(19) United States
(12) Patent Application Publication
(10) Pub. No.: US 2022/0127627 A1
(43) Pub. Date: Apr. 28, 2022

(54) GUIDED MICROBIAL REMODELING, A PLATFORM FOR THE RATIONAL IMPROVEMENT OF MICROBIAL SPECIES FOR AGRICULTURE

(71) Applicant: Pivot Bio, Inc., Berkeley, CA (US)

(72) Inventors: Sarah BLOCH, Berkeley, CA (US); Karsten TEMME, Berkeley, CA (US); Alvin TAMSIR, Berkeley, CA (US); Douglas HIGGINS, Berkeley, CA (US); Austin DAVIS-RICHARDSON, Berkeley, CA (US); Rosemary CLARK, Berkeley, CA (US); Shayin GOTTLIEB, Berkeley, CA (US)

(21) Appl. No.: 17/255,304

(22) PCT Filed: Jun. 27, 2019
(86) PCT No.: PCT/US2019/039528

§ 371 Date: Dec. 22, 2020

Related U.S. Application Data
(60) Provisional application No. 62/690,619, filed on Jun. 27, 2018.

(51) Int. Cl. C12N 15/74; C12Q 1/6869; C12N 1/20

(52) U.S. Cl. CPC C12N 15/74; C12Q 1/689; C12N 1/20; C12Q 1/6869

(57) ABSTRACT

The present disclosure provides guided microbial remodeling (GMR) methods for the rational improvement of plant-associated microbes to perform plant-beneficial functions. The GMR methods described herein allow for non-intergeneric genetic optimization of key regulatory networks within the microbes, which improve plant-beneficial functions over wild-type microbes but don't have the risks associated with transgenic approaches (e.g., unpredictable gene function, public and regulatory concerns, etc.). The present disclosure also provides remodeled microbes and compositions thereof. The utilization of remodeled microbes and compositions thereof will enable farmers to realize more productive and predictable crop yields without the nutrient degradation, leaching, or toxic runoff associated with traditional synthetically derived fertilizers.

### CROSS-REFERENCE TO RELATED APPLICATIONS

[0001] The present application claims the benefit of International PCT Application No. PCT/US2019/039528, filed Jun. 27, 2019, which claims the benefit of priority to U.S. Provisional Application No. 62/690,619, filed on Jun. 27, 2018, which is incorporated by reference herein in its entirety.

### INCORPORATION BY REFERENCE OF THE SEQUENCE LISTING

[0002] The contents of the text file submitted electronically herewith are incorporated herein by reference in their entirety: A computer readable format copy of the Sequence Listing filename: PIVO_007_01WO_SeqList_ST25.txt, date created, Jun. 26, 2019, file size 602 kilobytes.

### BACKGROUND OF THE DISCLOSURE

[0003] By 2050 the United Nations' Food and Agriculture Organization projects that total food production must increase by 70% to meet the needs of a growing population, a challenge that is exacerbated by numerous factors, including: diminishing freshwater resources, increasing competition for arable land, rising energy prices, increasing input costs, and the likely need for crops to adapt to the pressures of a drier, hotter, and more extreme global climate.

[0004] Current agricultural practices are not well equipped to meet this growing demand for food production, while simultaneously balancing the environmental impacts that result from increased agricultural intensity.

[0005] One of the major agricultural inputs needed to satisfy global food demand is nitrogen fertilizer. However, the current industrial standard utilized to produce nitrogen fertilizer, is an artificial nitrogen fixation method called the Haber-Bosch process, which converts atmospheric nitrogen (N₂) to ammonia (NH₃) by a reaction with hydrogen (H₂) using a metal catalyst under high temperatures and pressures. This process is resource intensive and deleterious to the environment.

[0006] In contrast to the synthetic Haber-Bosch process, certain biological systems have evolved to fix atmospheric nitrogen. These systems utilize an enzyme called nitrogenase that catalyzes the reaction between N₂ and H₂, and results in nitrogen fixation. For example, rhizobia are diazotrophic bacteria that fix nitrogen after becoming established inside root nodules of legumes. An important goal of nitrogen fixation research is the extension of this phenotype to non-leguminous plants, particularly to important agronomic grasses such as wheat, rice, and corn. However, despite the significant progress made in understanding the development of the nitrogen-fixing symbiosis between rhizobia and legumes, the path to use that knowledge to induce nitrogen-fixing nodules on non-leguminous crops is still not clear.

[0007] Consequently, the vast majority of modern row crop agriculture utilizes nitrogen fertilizer that is produced via the resource intensive and environmentally deleterious Haber-Bosch process. For instance, the USDA indicates that the average U.S. corn farmer typically applies between 130 and 200 lb. of nitrogen per acre (146 to 224 kg/ha). This nitrogen is not only produced in a resource intensive synthetic process, but is applied by heavy machinery crossing/impacting the field's soil, burning petroleum, and requiring hours of human labor.

[0008] Furthermore, the nitrogen fertilizer produced by the industrial Haber-Bosch process is not well utilized by the target crop. Rain, runoff, heat, volatilization, and the soil microbiome degrade the applied chemical fertilizer. This equates to not only wasted money, but also adds to increased pollution instead of harvested yield. To this end, the United Nations has calculated that nearly 80% of fertilizer is lost before a crop can utilize it. Consequently, modern agricultural fertilizer production and delivery is not only deleterious to the environment, but it is extremely inefficient.

[0009] In order to meet the world's growing food supply needs—while also balancing resource utilization and providing minimal impacts upon environmental systems—a better approach to nitrogen fixation and delivery to plants is urgently needed.

### SUMMARY OF THE DISCLOSURE

[0010] Provided herein are guided microbial remodeling (GMR) methods for the rational improvement of plant-associated microbes to perform plant-beneficial functions.

[0011] In one aspect, the GMR method comprises: (a) providing a plurality of microbial species that are associated with a target plant of interest; (b) assaying the plurality of microbial species for: colonization metrics, and ability to perform a plant-beneficial function of interest; (c) selecting a candidate microbial species from the plurality of assayed microbial species; (d) introducing one or more targeted non-intergeneric genetic variations into the candidate microbial species; (e) confirming integration of the non-intergeneric genetic variation at the target genomic locus and absence of any transgenetic sequence; and (f) repeating steps d) and e) one or more times, until the candidate microbial species has acquired an improved ability to perform the plant-beneficial function of interest.

[0012] In one aspect, the step b) of assaying the plurality of microbial species comprises assaying the plurality of microbial species for transcriptionally active genes under metabolically relevant environmental conditions.

[0013] In one aspect, the GMR method comprises a step of sequencing the genomes of the plurality of microbial species obtained in step a) and characterizing one or more genomic pathways, or sets of genes, that are associated with a plant-beneficial function of interest.

[0014] In one aspect, the step d) of introducing one or more targeted non-intergeneric genetic variations into the candidate microbial species comprises: (a) transforming the candidate microbial species with a transformation plasmid comprising (i) a selection marker, (ii) a counterselection marker, (iii) a DNA fragment comprising: a non-intergeneric genetic variation to be introduced into the candidate microbial species at a target genomic locus in one or more genomic pathways, or sets of genes, that are associated with a plant-beneficial function of interest, and homology arms to the target genomic locus flanking the non-intergeneric genetic variation, and (iv) plasmid backbone; (b) selecting for a candidate microbial species that has undergone an initial homologous recombination and has the non-intergeneric genetic variation integrated into the target genomic locus based on the presence of the selection marker in the genome; and (c) selecting for a candidate microbial species that has the non-intergeneric genetic variation integrated into the target genomic locus, but has undergone an additional homologous recombination that loops-out the plasmid backbone, based on the absence of the counterselection marker.

[0015] In one aspect, the step e) of confirming integration of the non-intergeneric genetic variation at the target genomic locus and absence of any transgenetic sequence comprises sequencing the genome of the transformed candidate microbial species and confirming absence of any transgenetic sequence from the genome of the transformed candidate microbial species. In one aspect, the step e) comprises confirming absence of any transgenetic sequence from the transformation plasmid.

[0016] In one aspect, the GMR method comprises: (a) providing a plurality of microbial species that are associated with a target plant of interest; (b) sequencing the genomes of the plurality of microbial species and characterizing one or more genomic pathways, or sets of genes, that are associated with a plant-beneficial function of interest; (c) assaying the plurality of microbial species for: colonization metrics, transcriptionally active genes under metabolically relevant environmental conditions, and ability to perform a plant-beneficial function of interest; (d) selecting a candidate microbial species from the plurality of assayed microbial species; (e) transforming the candidate microbial species with a transformation plasmid comprising: (i) a selection marker, (ii) a counterselection marker, (iii) a DNA fragment comprising: a non-intergeneric genetic variation to be introduced into the candidate microbial species at a target genomic locus in one or more genomic pathways, or sets of genes, that are associated with a plant-beneficial function of interest, and homology arms to the target genomic locus flanking the non-intergeneric genetic variation; and (iv) plasmid backbone; (f) selecting for a candidate microbial species that has undergone an initial homologous recombination and has the non-intergeneric genetic variation integrated into the target genomic locus based on the presence of the selection marker in the genome; (g) selecting for a candidate microbial species that has the non-intergeneric genetic variation integrated into the target genomic locus, but has undergone an additional homologous recombination that loops-out the plasmid backbone, based on the absence of the counterselection marker; (h) sequencing the genome of the transformed candidate microbial species and confirming integration of the non-intergeneric genetic variation at the target genomic locus and absence of any genetic sequence from the transformation plasmid; and (i) repeating steps e)-h) one or more times, until a candidate microbial species has acquired an improved ability to perform the plant-beneficial function of interest.

[0017] In one aspect, the plant-beneficial functions of interest in the methods described herein can be nitrogen fixation, phosphate solubilization, microbial colonization, or combinations thereof.

[0018] In one aspect, the step of sequencing the genomes of the plurality of microbial species and characterizing one or more genomic pathways, or sets of genes, that are associated with a plant-beneficial function of interest (e.g. step b of the method described above) comprises whole genome sequencing and/or characterizing the nitrogen fixation pathway.

[0019] In one aspect, characterizing the nitrogen fixation pathway comprises characterizing a set of genes selected from the group consisting of: nifA, nifL, ntrB, ntrC, polynucleotide encoding glutamine synthetase, glnA, glnB, glnK, drat, amtB, polynucleotide encoding glutaminase, glnD, glnE, nifJ, nifH, nifD, nifK, nifY, nifE, nifN, nifU, nifS, nifV, nifW, nifZ, nifM, nifF, nifB, nifQ, a gene associated with biosynthesis of a nitrogenase enzyme, and combinations thereof.

[0020] In one aspect, characterizing the microbial colonization pathway comprises characterizing one or more genes involved in a pathway selected from the group consisting of: exopolysaccharide production, endo-polygalaturonase production, trehalose production, and glutamine conversion.

[0021] In one aspect, characterizing the microbial colonization pathway comprises characterizing one or more genes selected from the group consisting of: bcsii, bcsiii, yjbE, fhaB, pehA, otsB, treZ, glsA2, and combinations thereof.

[0022] In one aspect, characterizing the microbial colonization pathway comprises characterizing one or more genes selected from the group consisting of: nifA, nijL, ntrB, ntrC, polynucleotide encoding glutamine synthetase, glnA, glnB, glnK, drat, amtB, polynucleotide encoding glutaminase, glnD, glnE, nifJ, nifH, nifD, nijK, nifY, nijE, nijN, nifU, nijS, nifV, nifW, nijZ, nifM, nijF, nijB, nifQ, a gene associated with biosynthesis of a nitrogenase enzyme, bcsii, bcsiii, yjbE, fhaB, pehA, otsB, treZ, glsA2, and combinations thereof.

[0023] In one aspect, the step of assaying the plurality of microbial species for colonization metrics (e.g. in step c of the method described above) comprises assaying the plurality of microbial species for colonization metrics under greenhouse or lab based conditions and/or under field conditions.

[0024] In one aspect, the colonization metric comprises at least one of the following: spatial colonization patterns, temporal colonization dynamics, density of colonization, or combinations thereof.

[0025] In one aspect, the step of assaying the plurality of microbial species for transcriptionally active genes under metabolically relevant environmental conditions (e.g. in step c of the method described above) occurs under greenhouse or lab based conditions.

[0026] In one aspect, the step of assaying the plurality of microbial species for transcriptionally active genes under metabolically relevant environmental conditions (e.g. in step c of the method described above) occurs under field conditions.

[0027] In one aspect, the step of assaying the plurality of microbial species for transcriptionally active genes under metabolically relevant environmental conditions (e.g. in step c of the method described above) occurs in vitro.

[0028] In one aspect, the step of assaying the plurality of microbial species for transcriptionally active genes under metabolically relevant environmental conditions (e.g. in step c of the method described above) occurs under greenhouse or lab based conditions; under field conditions; and/or in vitro.

[0029] In one aspect, the step of assaying the plurality of microbial species for transcriptionally active genes under metabolically relevant environmental conditions (e.g. in step c of the method described above) occurs under greenhouse or lab based conditions and comprises (i) measuring the transcriptomic profile of the microbial species; (ii) measuring the transcriptomic activity of genes associated with the microbial species' ability to perform a plant-beneficial function of interest; (iii) measuring the transcriptomic activity of regulatory gene sequences; (iv) measuring the transcriptomic activity of promoter sequences; (v) measuring the transcriptomic activity of promoter sequences in the presence of exogenous nitrogen; and/or (vi) measuring the transcriptomic activity of promoter sequences in the presence of exogenous nitrogen, wherein said transcriptomic activity of the promoter sequences is measured by quantifying the expression of a regulated gene.

[0030] In one aspect, the step of assaying the plurality of microbial species for transcriptionally active genes under metabolically relevant environmental conditions (e.g. in step c of the method described above) occurs under field conditions and comprises (i) measuring the transcriptomic profile of the microbial species; (ii) measuring the transcriptomic activity of genes associated with the microbial species' ability to perform a plant-beneficial function of interest; (iii) measuring the transcriptomic activity of regulatory gene sequences; (iv) measuring the transcriptomic activity of promoter sequences; (v) measuring the transcriptomic activity of promoter sequences in the presence of exogenous nitrogen; and/or (vi) measuring the transcriptomic activity of promoter sequences in the presence of exogenous nitrogen, wherein said transcriptomic activity of the promoter sequences is measured by quantifying the expression of a regulated gene.

[0031] In one aspect, the step of assaying the plurality of microbial species for transcriptionally active genes under metabolically relevant environmental conditions (e.g. in step c of the method described above) occurs in vitro and comprises (i) measuring the transcriptomic profile of the microbial species; (ii) measuring the transcriptomic activity of genes associated with the microbial species' ability to perform a plant-beneficial function of interest; (iii) measuring the transcriptomic activity of regulatory gene sequences; (iv) measuring the transcriptomic activity of promoter sequences; (v) measuring the transcriptomic activity of promoter sequences in nitrogen-depleted and nitrogen-replete conditions; and/or (vi) measuring the transcriptomic activity of promoter sequences in nitrogen-depleted and nitrogen-replete conditions, wherein said transcriptomic activity of the promoter sequences is measured by quantifying the expression of a regulated gene.

[0032] In one aspect, the step of assaying the plurality of microbial species for colonization metrics (e.g. in step c of the guided microbial remodeling method described above) comprises: growing said plurality of microbial species in intimate association with a target plant.

[0033] In one aspect, the step of assaying the plurality of microbial species for colonization metrics (e.g. in step c of the guided microbial remodeling method described above) comprises: growing said plurality of microbial species in intimate association with a target plant under greenhouse or lab based conditions.

[0034] In one aspect, the step of assaying the plurality of microbial species for colonization metrics (e.g. in step c of the guided microbial remodeling method described above) comprises: growing said plurality of microbial species in intimate association with a target plant under field conditions.

[0035] In one aspect, the step of assaying the plurality of microbial species for colonization metrics (e.g. in step c of the guided microbial remodeling method described above) comprises: growing said plurality of microbial species in intimate association with a target plant under greenhouse or lab based conditions and under field conditions.

[0036] In one aspect, the step of assaying the plurality of microbial species for transcriptionally active genes under metabolically relevant environmental conditions (e.g. in step c of the guided microbial remodeling method described above) comprises: growing said plurality of microbial species in intimate association with a target plant.

[0037] In one aspect, the step of assaying the plurality of microbial species for transcriptionally active genes under metabolically relevant environmental conditions (e.g. in step c of the guided microbial remodeling method described above) comprises: growing said plurality of microbial species in intimate association with a target plant under greenhouse or lab based conditions.

[0038] In one aspect, the step of assaying the plurality of microbial species for transcriptionally active genes under metabolically relevant environmental conditions (e.g. in step c of the guided microbial remodeling method described above) comprises: growing said plurality of microbial species in intimate association with a target plant under field conditions.

[0039] In one aspect, the step of assaying the plurality of microbial species for transcriptionally active genes under metabolically relevant environmental conditions (e.g. in step c of the guided microbial remodeling method described above) comprises: growing said plurality of microbial species in intimate association with a target plant under greenhouse or lab based conditions and under field conditions.

[0040] In one aspect, the step of assaying the plurality of microbial species for colonization metrics and transcriptionally active genes under metabolically relevant environmental conditions (e.g. in step c of the guided microbial remodeling method described above) comprises: growing said plurality of microbial species in intimate association with a target plant under field conditions.

[0041] In one aspect, the step of assaying the plurality of microbial species in step c of the guided microbial remodeling method described above comprises assaying the plurality of microbial species for ability to perform a plant-beneficial function of interest under greenhouse or lab based conditions.

[0042] In one aspect, the step of assaying the plurality of microbial species in step c of the guided microbial remodeling method described above comprises assaying the plurality of microbial species for nitrogen fixation activity. In one aspect, the nitrogen fixation activity is assayed in an acetylene reduction assay or ammonium excretion assay.

[0043] In one aspect, the transformation plasmid used in step e of the guided microbial remodeling method described above is a suicide plasmid.

[0044] In one aspect, sequencing the genome of the transformed candidate microbial species and confirming integration of the non-intergeneric genetic variation at the target genomic locus and absence of any genetic sequence from the transformation plasmid (step h of the guided microbial remodeling method described above) comprises whole genome sequencing.

[0045] In one aspect, provided herein is a guided microbial remodeling method for the rational improvement of plant-associated microbes to perform plant-beneficial functions, comprising: (a) providing a plurality of microbial species; (b) assaying the plurality of microbial species for: colonization metrics, and ability to perform a plant-beneficial function of interest; (c) selecting a candidate microbial species from the plurality of assayed microbial species; (d) introducing one or more targeted non-intergeneric genetic variations into the candidate microbial species at a target genomic locus in one or more genomic pathways, or sets of genes, that are associated with a plant-beneficial function of interest; (e) confirming integration of the non-intergeneric genetic variation at the target genomic locus and absence of any transgenic genetic sequence; and (0 repeating steps d)-e) one or more times, until a candidate microbial species has acquired an improved ability to perform the plant-beneficial function of interest. In a further aspect of this embodiment, the step b) comprises assaying transcriptionally active genes under metabolically relevant environmental conditions. In a further aspect of this embodiment, in step d), said non-intergeneric genetic variations are selected from the group consisting of: full gene deletions, partial gene deletions, promoter insertions, single base pair changes, and combinations thereof. In yet further aspect of this embodiment, step e) comprises sequencing the genome of the candidate microbial species.

[0046] In one aspect, provided herein is A guided microbial remodeling method for the rational improvement of plant-associated microbes to perform plant-beneficial functions, comprising: (a) providing a plurality of microbial species; (b) assaying the plurality of microbial species for: colonization metrics, and ability to perform a plant-beneficial function of interest; (c) selecting a candidate microbial species from the plurality of assayed microbial species; (d) introducing two or more targeted non-intergeneric genetic variations into the candidate microbial species at two or more target genomic loci, in one or more genomic pathways, or sets of genes, that are associated with a plant-beneficial function of interest; and (e) confirming introduction of the non-intergeneric genetic variations at the target genomic loci and absence of any transgenic genetic sequence. In a further aspect of this embodiment, step b) comprises assaying transcriptionally active genes under metabolically relevant environmental conditions. In a further aspect of this embodiment, in step d), said non-intergeneric genetic variations are selected from the group consisting of: full gene deletions, partial gene deletions, promoter insertions, single base pair changes, and combinations thereof. In a further aspect of this embodiment, step e) comprises sequencing the genome of the candidate microbial species.

[0047] In one aspect, provided herein is a guided microbial remodeling method for the rational improvement of plant-associated microbes to perform plant-beneficial functions, comprising: (a) providing a plurality of microbial species; (b) assaying the plurality of microbial species for: colonization metrics, transcriptionally active genes under metabolically relevant environmental conditions, and ability to perform a plant-beneficial function of interest; (c) selecting a candidate microbial species from the plurality of assayed microbial species; (d) introducing one or more targeted non-intergeneric genetic variations into the candidate microbial species at a target genomic locus in one or more genomic pathways, or sets of genes, that are associated with a plant-beneficial function of interest, said non-intergeneric genetic variations selected from the group consisting of: full gene deletions, partial gene deletions, promoter insertions, single base pair changes, and combinations thereof (e) sequencing the genome of the candidate microbial species and confirming integration of the non-intergeneric genetic variation at the target genomic locus and absence of any transgenic genetic sequence; and (0 repeating steps d)-e) one or more times, until a candidate microbial species has acquired an improved ability to perform the plant-beneficial function of interest.

[0048] In one aspect, provided herein is a guided microbial remodeling method for the rational improvement of plant-associated microbes to perform plant-beneficial functions, comprising: (a) providing a plurality of microbial species; (b) assaying the plurality of microbial species for: colonization metrics, transcriptionally active genes under metabolically relevant environmental conditions, and ability to perform a plant-beneficial function of interest; (c) selecting a candidate microbial species from the plurality of assayed microbial species; (d) introducing two or more targeted non-intergeneric genetic variations into the candidate microbial species at two or more target genomic loci, in one or more genomic pathways, or sets of genes, that are associated with a plant-beneficial function of interest, said non-intergeneric genetic variations selected from the group consisting of: full gene deletions, partial gene deletions, promoter insertions, single base pair changes, and combinations thereof; and (e) sequencing the genome of the candidate microbial species and confirming introduction of the non-intergeneric genetic variations at the target genomic loci and absence of any transgenic genetic sequence.

[0049] In one aspect, provided is a computationally guided microbial remodeling method for the rational improvement of plant-associated microbes to perform plant-beneficial functions, comprising: (a) accessing a plurality of microbial whole genome sequences; (b) identifying a plurality of regulatory gene sequences that actively regulate the transcription of a gene under a metabolically relevant environmental condition; (c) identifying a plurality of genes associated with a plant-beneficial function; (d) selecting a regulatory gene sequence and a gene associated with a plant-beneficial function from said pluralities; wherein steps a)-d) occur in silico; and (e) manufacturing, in vivo, a remodeled microbial cell that has the selected regulatory gene sequence operably linked to the selected gene associated with a plant-beneficial function, thereby improving the expression of the gene associated with a plant-beneficial function.

[0050] In one aspect, provided is a computationally guided microbial remodeling system for the rational improvement of plant-associated microbes to perform plant-beneficial functions, comprising: (a) one or more processors; and (b) one or more memories operatively coupled to the one or more processors and having instructions stored thereon, that when executed by the one or more processors, cause the system to: (i) access a plurality of microbial whole genome sequences; (ii) identify a plurality of regulatory gene sequences that actively regulate the transcription of a gene under a metabolically relevant environmental condition; (iii) identify a plurality of genes associated with a plant-beneficial function; and (iv) select a regulatory gene sequence and a gene associated with a plant-beneficial function from said pluralities.

[0051] In one aspect, provided is a computationally guided microbial remodeling method for the rational improvement of plant-associated microbes to perform plant-beneficial functions, comprising: (a) activating a computer system having: one or more processors and one or more memories operatively coupled to the one or more processors and having instructions stored thereon, thereby causing the one or more processors to execute the instructions, and cause the system to: (i) access a plurality of microbial whole genome sequences; (ii) identify a plurality of regulatory gene sequences that actively regulate the transcription of a gene under a metabolically relevant environmental condition; (iii) identify a plurality of genes associated with a plant-beneficial function; (iv) select a regulatory gene sequence and a gene associated with a plant-beneficial function from said pluralities; and (b) manufacturing, in vivo, a remodeled microbial cell that has the selected regulatory gene sequence operably linked to the selected gene associated with a plant-beneficial function, thereby improving the expression of the gene associated with a plant-beneficial function.

### BRIEF DESCRIPTION OF THE DRAWINGS

[0052] FIG. 1A depicts an overview of the guided microbial remodeling process, in accordance with embodiments.

[0053] FIG. 1B depicts an expanded view of the measurement of microbiome composition as shown in FIG. 1A.

[0054] FIG. 1C depicts a problematic “traditional bioprospecting” approach, which has several drawbacks compared to the taught guided microbial remodeling (GMR) platform.

[0055] FIG. 1D depicts a problematic “field-first approach to bioprospecting” system, which has several drawbacks compared to the taught guided microbial remodeling (GMR) platform.

[0056] FIG. 1E depicts the time period in the corn growth cycle, at which nitrogen is needed most by the plant.

[0057] FIG. 1F depicts an overview of a field development process for a remodeled microbe.

[0058] FIG. 1G depicts an overview of a guided microbial remodeling platform embodiment.

[0059] FIG. 1H depicts an overview of a computationally-guided microbial remodeling platform.

[0060] FIG. 1I depicts the use of field data combined with modeling in aspects of the guided microbial remodeling platform.

[0061] FIG. 1J depicts 5 properties that can be possessed by remodeled microbes of the present disclosure.

[0062] FIG. 1K depicts a schematic of a remodeling approach for a microbe, PBC6.1.

[0063] FIG. 1L depicts decoupled nifA expression from endogenous nitrogen regulation in remodeled microbes.

[0064] FIG. 1M depicts improved assimilation and excretion of fixed nitrogen by remodeled microbes.

[0065] FIG. 1N depicts corn yield improvement attributable to remodeled microbes.

[0066] FIG. 1O illustrates the inefficiency of current nitrogen delivery systems, which result in underfertilized fields, over fertilized fields, and environmentally deleterious nitrogen runoff

[0067] FIG. 2 illustrates PBC6.1 colonization to nearly 21% abundance of the root-associated microbiota in corn roots. Abundance data is based on 16S amplicon sequencing of the rhizosphere and endosphere of corn plants inoculated with PBC6.1 and grown in greenhouse conditions.

[0068] FIGS. 3A-3E illustrate derivative microbes that fix and excrete nitrogen in vitro under conditions similar to high nitrate agricultural soils. FIG. 3A illustrates the regulatory network controlling nitrogen fixation and assimilation in PBC6.1 is shown, including the key nodes NifL, NifA, GS, GlnE depicted as the two-domain ATase-AR enzyme, and AmtB. FIG. 3B illustrates the genome of Kosakonia sacchari isolate PBC6.1. The three tracks circumscribing the genome convey transcription data from PBC6.1, PBC6.38, and the differential expression between the strains respectively. FIG. 3C illustrates the nitrogen fixation gene cluster and transcription data is expanded for finer detail. FIG. 3D illustrates nitrogenase activity under varying concentrations of exogenous nitrogen is measured with the acetylene reduction assay. The wild type strain exhibits repression of nitrogenase activity as glutamine concentrations increase, while derivative strains show varying degrees of robustness. In the line graph, triangles represent strain PBC6.22; circles represent strain PBC6.1; squares represent strain PBC6.15; and diamonds represent strain PBC6.14. Error bars represent standard error of the mean of at least three biological replicates. FIG. 3E illustrates temporal excretion of ammonia by derivative strains is observed at mM concentrations. Wild type strains are not observed to excrete fixed nitrogen, and negligible ammonia accumulates in the media. Error bars represent standard error of the mean.

[0069] FIG. 4 illustrates transcriptional rates of nifA in derivative strains of PBC6.1 correlated with acetylene reduction rates. An ARA assay was performed as described in the Methods, after which cultures were sampled and subjected to qPCR analysis to determine nifA transcript levels. Error bars show standard error of the mean of at least three biological replicates in each measure.

[0070] FIGS. 5A-5C illustrate greenhouse experiments that demonstrate microbial nitrogen fixation in corn. FIG. 5A illustrates microbe colonization six weeks after inoculation of corn plants by PBC6.1 derivative strains. Error bars show standard error of the mean of at least eight biological replicates. FIG. 5B illustrates in planta transcription of nifH measured by extraction of total RNA from roots and subsequent Nanostring analysis. Only derivative strains show nifH transcription in the root environment. Error bars show standard error of the mean of at least 3 biological replicates. FIG. 5C illustrates microbial nitrogen fixation measured by the dilution of isotopic tracer in plant tissues. Derivative microbes exhibit substantial transfer of fixed nitrogen to the plant. Error bars show standard error of the mean of at least ten biological replicates.

[0071] FIG. 6 depicts the lineage of modified strains that were derived from strain C1006.

[0072] FIG. 7 depicts the lineage of modified strains that were derived from strain C1019.

[0073] FIG. 8 depicts a heatmap of the pounds of nitrogen delivered per acre-season by microbes of the present disclosure recorded as a function of microbes per g-fresh weight by mmol of nitrogen/microbe-hr. Below the thin line that transects the larger image are the microbes that deliver less than one pound of nitrogen per acre-season, and above the line are the microbes that deliver greater than one pound of nitrogen per acre-season. The table below the heatmap gives the precise value of mmol N produced per microbe per hour (mmol N/Microbe hr) along with the precise CFU per gram of fresh weight (CFU/g fw) for each microbe shown in the heatmap. The microbes utilized in the heatmap were assayed for N production in corn. For the WT strains C1006 and C1019, corn root colonization data was taken from a single field site. For the remaining strains, colonization was assumed to be the same as the WT field level. N-fixation activity was determined using an in vitro ARA assay at 5 mM glutamine.

[0074] FIG. 9 depicts the plant yield of plants having been exposed to strain C1006. The area of the circles corresponds to the relative yield, while the shading corresponds to the particular MRTN treatment. The x-axis is the p value and the y-axis is the win rate.

[0075] FIG. 10 depicts the plant yield of plants having been exposed to strain CM029. The area of the circles corresponds to the relative yield, while the shading corresponds to the particular MRTN treatment. The x-axis is the p value and the y-axis is the win rate.

[0076] FIG. 11 depicts the plant yield of plants having been exposed to strain CM038. The area of the circles corresponds to the relative yield, while the shading corresponds to the particular MRTN treatment. The x-axis is the p value and the y-axis is the win rate.

[0077] FIG. 12 depicts the plant yield of plants having been exposed to strain CI019. The area of the circles corresponds to the relative yield, while the shading corresponds to the particular MRTN treatment. The x-axis is the p value and the y-axis is the win rate.

[0078] FIG. 13 depicts the plant yield of plants having been exposed to strain CM081. The area of the circles corresponds to the relative yield, while the shading corresponds to the particular MRTN treatment. The x-axis is the p value and the y-axis is the win rate.

[0079] FIG. 14 depicts the plant yield of plants having been exposed to strains CM029 and CM081. The area of the circles corresponds to the relative yield, while the shading corresponds to the particular MRTN treatment. The x-axis is the p value and the y-axis is the win rate.

[0080] FIG. 15 depicts the plant yield of plants as the aggregated bushel gain/loss. The area of the circles corresponds to the relative yield, while the shading corresponds to the particular MRTN treatment. The x-axis is the p value and the y-axis is the win rate.

[0081] FIG. 16 illustrates results from a summer 2017 field testing experiment. The yield results obtained demonstrate that the microbes of the disclosure can serve as a potential fertilizer replacement. For instance, the utilization of a microbe of the disclosure (i.e. 6-403) resulted in a higher yield than the wild type strain (WT) and a higher yield than the untreated control (UTC). The “−25 lbs N” treatment utilizes 25 lbs less N per acre than standard agricultural practices of the region. The “100% N” UTC treatment is meant to depict standard agricultural practices of the region, in which 100% of the standard utilization of N is deployed by the farmer. The microbe “6-403” was deposited as NCMA 201708004 and can be found in Table 1. This is a mutant Kosakonia sacchari (also called CM037) and is a progeny mutant strain from CI006 WT.

[0082] FIG. 17 illustrates results from a summer 2017 field testing experiment. The yield results obtained demonstrate that the microbes of the disclosure perform consistently across locations. Furthermore, the yield results demonstrate that the microbes of the disclosure perform well in both a nitrogen stressed environment, as well as an environment that has sufficient supplies of nitrogen. The microbe “6-881” (also known as CM094, PBC6.94), and which is a progeny mutant Kosakonia sacchari strain from CI006 WT, was deposited as NCMA 201708002 and can be found in Table 1. The microbe “137-1034,” which is a progeny mutant Klebsiella variicola strain from CI137 WT, was deposited as NCMA 201712001 and can be found in Table 1. The microbe “137-1036,” which is a progeny mutant Klebsiella variicola strain from CI137 WT, was deposited as NCMA 201712002 and can be found in Table 1. The microbe “6-404” (also known as CM38, PBC6.38), and which is a progeny mutant Kosakonia sacchari strain from CI006 WT, was deposited as NCMA 201708003 and can be found in Table 1. The “Nutrient Stress” condition corresponds to the 0% nitrogen regime. The “Sufficient Fertilizer” condition corresponds to the 100% nitrogen regime.

[0083] FIG. 18 depicts the lineage of modified strains that were derived from strain CI006 (also termed “6”, Kosakonia sacchari WT).

[0084] FIG. 19 depicts the lineage of modified strains that were derived from strain CI019 (also termed “19”, Rahnella aquatilis WT).

[0085] FIG. 20 depicts the lineage of modified strains that were derived from strain CI137 (also termed (“137”, Klebsiella variicola WT).

[0086] FIG. 21 depicts the lineage of modified strains that were derived from strain 1021 (Kosakonia pseudosacchari WT).

[0087] FIG. 22 depicts the lineage of modified strains that were derived from strain 910 (Kluyvera intermedia WT).

[0088] FIG. 23 depicts the lineage of modified strains that were derived from strain 63 (Rahnella aquatilis WT).

[0089] FIG. 24 depicts a heatmap of the pounds of nitrogen delivered per acre-season by microbes of the present disclosure recorded as a function of microbes per g-fresh weight by mmol of nitrogen/microbe-hr. Below the thin line that transects the larger image are the microbes that deliver less than one pound of nitrogen per acre-season, and above the line are the microbes that deliver greater than one pound of nitrogen per acre-season. The Table 28 in Example 5 gives the precise value of mmol N produced per microbe per hour (mmol N/Microbe hr) along with the precise CFU per gram of fresh weight (CFU/g fw) for each microbe shown in the heatmap. The data in FIG. 24 is derived from microbial strains assayed for N production in corn in field conditions. Each point represents lb N/acre produced by a microbe using corn root colonization data from a single field site. N-fixation activity was determined using in vitro ARA assay at 5 mM N in the form of glutamine or ammonium phosphate.

[0090] FIG. 25 depicts a heatmap of the pounds of nitrogen delivered per acre-season by microbes of the present disclosure recorded as a function of microbes per g-fresh weight by mmol of nitrogen/microbe-hr. Below the thin line that transects the larger image are the microbes that deliver less than one pound of nitrogen per acre-season, and above the line are the microbes that deliver greater than one pound of nitrogen per acre-season. The Table 29 in Example 5 gives the precise value of mmol N produced per microbe per hour (mmol N/Microbe hr) along with the precise CFU per gram of fresh weight (CFU/g fw) for each microbe shown in the heatmap. The data in FIG. 25 is derived from microbial strains assayed for N production in corn in laboratory and greenhouse conditions. Each point represents lb N/acre produced by a single strain. White points represent strains in which corn root colonization data was gathered in greenhouse conditions. Black points represent mutant strains for which corn root colonization levels are derived from average field corn root colonization levels of the wild-type parent strain. Hatched points represent the wild type parent strains at their average field corn root colonization levels. In all cases, N-fixation activity was determined by in vitro ARA assay at 5 mM N in the form of glutamine or ammonium phosphate.

[0091] FIG. 26 illustrates excretion of ammonia excretion by WT CI137 and mutant strains described in Example 7. The WT strain was observed not to excrete ammonia, and negligible ammonia accumulates in the media.

[0092] FIG. 27 illustrates microbial colonization in corn three weeks after planting. The corn seed was inoculated at planting by CI137 WT and derivative strains described in Example 7.

[0093] FIG. 28 illustrates the same data from FIG. 27 but in a slightly different way. FIG. 28 illustrates average microbial colonization in corn three weeks after planting. The corn seed was inoculated at planting by CI137 WT and derivative strains described in Example 7.

### DETAILED DESCRIPTION OF THE DISCLOSURE

[0094] While various embodiments of the disclosure have been shown and described herein, it will be obvious to those skilled in the art that such embodiments are provided by way of example only. Numerous variations, changes, and substitutions may occur to those skilled in the art without departing from the disclosure. It should be understood that various alternatives to the embodiments of the disclosure described herein may be employed.

[0095] Increased fertilizer utilization brings with it environmental concerns and is also likely not possible for many economically stressed regions of the globe. Furthermore, many industry players in the microbial arena are focused on creating intergeneric microbes. However, there is a heavy regulatory burden placed on engineered microbes that are characterized/classified as intergeneric. These intergeneric microbes face not only a higher regulatory burden, which makes widespread adoption and implementation difficult, but they also face a great deal of public perception scrutiny.

[0096] Currently, there are no engineered microbes on the market that are non-intergeneric and that are capable of increasing nitrogen fixation in non-leguminous crops. This dearth of such a microbe is a missing element in helping to usher in a truly environmentally friendly and more sustainable 21^{st} century agricultural system.

[0097] The present disclosure solves the aforementioned problems and provides a non-intergeneric microbe that has been engineered to readily fix nitrogen in crops. These microbes are not characterized/classified as intergeneric microbes and thus will not face the steep regulatory burdens of such. Further, the taught non-intergeneric microbes will serve to help 21^{st} century farmers become less dependent upon utilizing ever increasing amounts of exogenous nitrogen fertilizer.

### Definitions

[0098] The use of the terms “a” and “an” and “the” and similar referents in the context of describing the disclosure (especially in the context of the following claims) are to be construed to cover both the singular and the plural, unless otherwise indicated herein or clearly contradicted by context. The terms “comprising,” “having,” “including,” and “containing” are to be construed as open-ended terms (i.e., meaning “including, but not limited to,”) unless otherwise noted. Recitation of ranges of values herein are merely intended to serve as a shorthand method of referring individually to each separate value falling within the range, unless otherwise indicated herein, and each separate value is incorporated into the specification as if it were individually recited herein. For example, if the range 10-15 is disclosed, then 11, 12, 13, and 14 are also disclosed. All methods described herein can be performed in any suitable order unless otherwise indicated herein or otherwise clearly contradicted by context. The use of any and all examples, or exemplary language (e.g., “such as”) provided herein, is intended merely to better illuminate the disclosure and does not pose a limitation on the scope of the disclosure unless otherwise claimed. No language in the specification should be construed as indicating any non-claimed element as essential to the practice of the disclosure.

[0099] The terms “polynucleotide”, “nucleotide”, “nucleotide sequence”, “nucleic acid” and “oligonucleotide” are used interchangeably. They refer to a polymeric form of nucleotides of any length, either deoxyribonucleotides or ribonucleotides, or analogs thereof. Polynucleotides may have any three-dimensional structure, and may perform any function, known or unknown. The following are non-limiting examples of polynucleotides: coding or non-coding regions of a gene or gene fragment, loci (locus) defined from linkage analysis, exons, introns, messenger RNA (mRNA), transfer RNA (tRNA), ribosomal RNA (rRNA), short interfering RNA (siRNA), short-hairpin RNA (shRNA), micro-RNA (miRNA), ribozymes, cDNA, recombinant polynucleotides, branched polynucleotides, plasmids, vectors, isolated DNA of any sequence, isolated RNA of any sequence, nucleic acid probes, and primers. A polynucleotide may comprise one or more modified nucleotides, such as methylated nucleotides and nucleotide analogs. If present, modifications to the nucleotide structure may be imparted before or after assembly of the polymer. The sequence of nucleotides may be interrupted by non-nucleotide components. A polynucleotide may be further modified after polymerization, such as by conjugation with a labeling component.

[0100] “Hybridization” refers to a reaction in which one or more polynucleotides react to form a complex that is stabilized via hydrogen bonding between the bases of the nucleotide residues. The hydrogen bonding may occur by Watson Crick base pairing, Hoogstein binding, or in any other sequence specific manner according to base complementarity. The complex may comprise two strands forming a duplex structure, three or more strands forming a multi stranded complex, a single self-hybridizing strand, or any combination of these. A hybridization reaction may constitute a step in a more extensive process, such as the initiation of PCR, or the enzymatic cleavage of a polynucleotide by an endonuclease. A second sequence that is complementary to a first sequence is referred to as the “complement” of the first sequence. The term “hybridizable” as applied to a polynucleotide refers to the ability of the polynucleotide to form a complex that is stabilized via hydrogen bonding between the bases of the nucleotide residues in a hybridization reaction.

[0101] “Complementarity” refers to the ability of a nucleic acid to form hydrogen bond(s) with another nucleic acid sequence by either traditional Watson-Crick or other non-traditional types. A percent complementarity indicates the percentage of residues in a nucleic acid molecule which can form hydrogen bonds (e.g., Watson-Crick base pairing) with a second nucleic acid sequence (e.g., 5, 6, 7, 8, 9, 10 out of 10 being 50%, 60%, 70%, 80%, 90%, and 100% complementary, respectively). “Perfectly complementary” means that all the contiguous residues of a nucleic acid sequence will hydrogen bond with the same number of contiguous residues in a second nucleic acid sequence. “Substantially complementary” as used herein refers to a degree of complementarity that is at least 60%, 65%, 70%, 75%, 80%, 85%, 90%, 95%, 97%, 98%, 99%, or 100% over a region of 8, 9, 10, 11, 12, 13, 14, 15, 16, 17, 18, 19, 20, 21, 22, 23, 24, 25, 30, 35, 40, 45, 50, or more nucleotides, or refers to two nucleic acids that hybridize under stringent conditions. Sequence identity, such as for the purpose of assessing percent complementarity, may be measured by any suitable alignment algorithm, including but not limited to the Needleman-Wunsch algorithm (see e.g. the EMBOSS Needle aligner available at www.ebi.ac.uk/Tools/psa/emboss_needle/nucleotide.html, optionally with default settings), the BLAST algorithm (see e.g. the BLAST alignment tool available at blast.ncbi.nlm.nih.gov/Blast.cgi, optionally with default settings), or the Smith-Waterman algorithm (see e.g. the EMBOSS Water aligner available at www.ebi.ac.uk/Tools/psa/emboss_water/nucleotide.html, optionally with default settings). Optimal alignment may be assessed using any suitable parameters of a chosen algorithm, including default parameters.

[0102] In general, “stringent conditions” for hybridization refer to conditions under which a nucleic acid having complementarity to a target sequence predominantly hybridizes with a target sequence, and substantially does not hybridize to non-target sequences. Stringent conditions are generally sequence-dependent and vary depending on a number of factors. In general, the longer the sequence, the higher the temperature at which the sequence specifically hybridizes to its target sequence. Non-limiting examples of stringent conditions are described in detail in Tijssen (1993), Laboratory Techniques In Biochemistry And Molecular Biology-Hybridization With Nucleic Acid Probes Part I, Second Chapter “Overview of principles of hybridization and the strategy of nucleic acid probe assay”, Elsevier, N.Y.

[0103] As used herein, “expression” refers to the process by which a polynucleotide is transcribed from a DNA template (such as into and mRNA or other RNA transcript) and/or the process by which a transcribed mRNA is subsequently translated into peptides, polypeptides, or proteins. Transcripts and encoded polypeptides may be collectively referred to as “gene product.” If the polynucleotide is derived from genomic DNA, expression may include splicing of the mRNA in a eukaryotic cell.

[0104] The terms “polypeptide”, “peptide” and “protein” are used interchangeably herein to refer to polymers of amino acids of any length. The polymer may be linear or branched, it may comprise modified amino acids, and it may be interrupted by non-amino acids. The terms also encompass an amino acid polymer that has been modified; for example, disulfide bond formation, glycosylation, lipidation, acetylation, phosphorylation, or any other manipulation, such as conjugation with a labeling component. As used herein the term “amino acid” includes natural and/or unnatural or synthetic amino acids, including glycine and both the D or L optical isomers, and amino acid analogs and peptidomimetics.

[0105] As used herein, the term “about” is used synonymously with the term “approximately.” Illustratively, the use of the term “about” with regard to an amount indicates that values slightly outside the cited values, e.g., plus or minus 0.1% to 10%.

[0106] The term “biologically pure culture” or “substantially pure culture” refers to a culture of a bacterial species described herein containing no other bacterial species in quantities sufficient to interfere with the replication of the culture or be detected by normal bacteriological techniques.

[0107] “Plant productivity” refers generally to any aspect of growth or development of a plant that is a reason for which the plant is grown. For food crops, such as grains or vegetables, “plant productivity” can refer to the yield of grain or fruit harvested from a particular crop. As used herein, improved plant productivity refers broadly to improvements in yield of grain, fruit, flowers, or other plant parts harvested for various purposes, improvements in growth of plant parts, including stems, leaves and roots, promotion of plant growth, maintenance of high chlorophyll content in leaves, increasing fruit or seed numbers, increasing fruit or seed unit weight, reducing NO₂ emission due to reduced nitrogen fertilizer usage and similar improvements of the growth and development of plants.

[0108] Microbes in and around food crops can influence the traits of those crops. Plant traits that may be influenced by microbes include: yield (e.g., grain production, biomass generation, fruit development, flower set); nutrition (e.g., nitrogen, phosphorus, potassium, iron, micronutrient acquisition); abiotic stress management (e.g., drought tolerance, salt tolerance, heat tolerance); and biotic stress management (e.g., pest, weeds, insects, fungi, and bacteria). Strategies for altering crop traits include: increasing key metabolite concentrations; changing temporal dynamics of microbe influence on key metabolites; linking microbial metabolite production/degradation to new environmental cues; reducing negative metabolites; and improving the balance of metabolites or underlying proteins.

[0109] As used herein, a “control sequence” refers to an operator, promoter, silencer, or terminator.

[0110] As used herein, “in planta” may refer to in the plant, on the plant, or intimately associated with the plant, depending upon context of usage (e.g. endophytic, epiphytic, or rhizospheric associations). The plant may comprise plant parts, tissue, leaves, roots, root hairs, rhizomes, stems, seed, ovules, pollen, flowers, fruit, etc.

[0111] In some embodiments, native or endogenous control sequences of genes of the present disclosure are replaced with one or more intrageneric control sequences.

[0112] As used herein, “introduced” refers to the introduction by means of modern biotechnology, and not a naturally occurring introduction.

[0113] In some embodiments, the bacteria of the present disclosure have been modified such that they are not naturally occurring bacteria.

[0114] In some embodiments, the bacteria of the present disclosure are present in the plant in an amount of at least 10³ cfu, 10⁴ cfu, 10⁵ cfu, 10⁶ cfu, 10⁷ cfu, 10⁸ cfu, 10⁹ cfu, 10¹⁰ cfu, 10¹¹ cfu, or 10¹² cfu per gram of fresh or dry weight of the plant. In some embodiments, the bacteria of the present disclosure are present in the plant in an amount of at least about 10³ cfu, about 10⁴ cfu, about 10⁵ cfu, about 10⁶ cfu, about 10⁷ cfu, about 10⁸ cfu, about 10⁹ cfu, about 10¹⁰ cfu, about 10¹¹ cfu, or about 10¹² cfu per gram of fresh or dry weight of the plant. In some embodiments, the bacteria of the present disclosure are present in the plant in an amount of at least 10³ to 10⁹, 10³ to 10⁷, 10³ to 10⁵, 10⁵ to 10⁹, 10⁵ to 10⁷, 10⁶ to 10¹⁰, 10⁶ to 10⁷ cfu per gram of fresh or dry weight of the plant.

[0115] Fertilizers and exogenous nitrogen of the present disclosure may comprise the following nitrogen-containing molecules: ammonium, nitrate, nitrite, ammonia, glutamine, etc. Nitrogen sources of the present disclosure may include anhydrous ammonia, ammonia sulfate, urea, diammonium phosphate, urea-form, monoammonium phosphate, ammonium nitrate, nitrogen solutions, calcium nitrate, potassium nitrate, sodium nitrate, etc.

[0116] As used herein, “exogenous nitrogen” refers to non-atmospheric nitrogen readily available in the soil, field, or growth medium that is present under non-nitrogen limiting conditions, including ammonia, ammonium, nitrate, nitrite, urea, uric acid, ammonium acids, etc.

[0117] As used herein, “non-nitrogen limiting conditions” refers to non-atmospheric nitrogen available in the soil, field, media at concentrations greater than about 4 mM nitrogen, as disclosed by Kant et al. (2010. J. Exp. Biol. 62(4):1499-1509), which is incorporated herein by reference.

[0118] As used herein, an “intergeneric microorganism” is a microorganism that is formed by the deliberate combination of genetic material originally isolated from organisms of different taxonomic genera. An “intergeneric mutant” can be used interchangeably with “intergeneric microorganism”. An exemplary “intergeneric microorganism” includes a microorganism containing a mobile genetic element that was first identified in a microorganism in a genus different from the recipient microorganism. Further explanation can be found, inter alia, in 40 C.F.R. § 725.3.

[0119] In aspects, microbes taught herein are “non-intergeneric,” which means that the microbes are not intergeneric.

[0120] As used herein, an “intrageneric microorganism” is a microorganism that is formed by the deliberate combination of genetic material originally isolated from organisms of the same taxonomic genera. An “intrageneric mutant” can be used interchangeably with “intrageneric microorganism”.

[0121] As used herein, “introduced genetic material” means genetic material that is added to, and remains as a component of, the genome of the recipient.

[0122] As used herein, in the context of non-intergeneric microorganisms, the term “remodeled” is used synonymously with the term “engineered”. Consequently, a “non-intergeneric remodeled microorganism” has a synonymous meaning to “non-intergeneric engineered microorganism,” and will be utilized interchangeably. Further, the disclosure may refer to an “engineered strain” or “engineered derivative” or “engineered non-intergeneric microbe,” these terms are used synonymously with “remodeled strain” or “remodeled derivative” or “remodeled non-intergeneric microbe.”

[0123] In some embodiments, the nitrogen fixation and assimilation genetic regulatory network comprises polynucleotides encoding genes and non-coding sequences that direct, modulate, and/or regulate microbial nitrogen fixation and/or assimilation and can comprise polynucleotide sequences of the nif cluster (e.g., nifA, nijB, nifC, . . . nifZ), polynucleotides encoding nitrogen regulatory protein C, polynucleotides encoding nitrogen regulatory protein B, polynucleotide sequences of the gln cluster (e.g. glnA and glnD), draT, and ammonia transporters/permeases. In some cases, the Nif cluster may comprise NifB, NifH, NifD, NifK, NifE, NifN, NifX, hesa, and NifV. In some cases, the Nif cluster may comprise a subset of NifB, NifH, NifD, NifK, NifE, NifN, NifX, hesa, and NifV.

[0124] In some embodiments, fertilizer of the present disclosure comprises at least 5%, 6%, 7%, 8%, 9%, 10%, 11%, 12%, 13%, 14%, 15%, 16%, 17%, 18%, 19%, 20%, 21%, 22%, 23%, 24%, 25%, 26%, 27%, 28%, 29%, 30%, 31%, 32%, 33%, 34%, 35%, 36%, 37%, 38%, 39%, 40%, 41%, 42%, 43%, 44%, 45%, 46%, 47%, 48%, 49%, 50%, 51%, 52%, 53%, 54%, 55%, 56%, 57%, 58%, 59%, 60%, 61%, 62%, 63%, 64%, 65%, 66%, 67%, 68%, 69%, 70%, 71%, 72%, 73%, 74%, 75%, 76%, 77%, 78%, 79%, 80%, 81%, 82%, 83%, 84%, 85%, 86%, 87%, 88%, 89%, 90%, 91%, 92%, 93%, 94%, 95%, 96%, 97%, 98%, 99% nitrogen by weight.

[0125] In some embodiments, fertilizer of the present disclosure comprises at least about 5%, about 6%, about 7%, about 8%, about 9%, about 10%, about 11%, about 12%, about 13%, about 14%, about 15%, about 16%, about 17%, about 18%, about 19%, about 20%, about 21%, about 22%, about 23%, about 24%, about 25%, about 26%, about 27%, about 28%, about 29%, about 30%, about 31%, about 32%, about 33%, about 34%, about 35%, about 36%, about 37%, about 38%, about 39%, about 40%, about 41%, about 42%, about 43%, about 44%, about 45%, about 46%, about 47%, about 48%, about 49%, about 50%, about 51%, about 52%, about 53%, about 54%, about 55%, about 56%, about 57%, about 58%, about 59%, about 60%, about 61%, about 62%, about 63%, about 64%, about 65%, about 66%, about 67%, about 68%, about 69%, about 70%, about 71%, about 72%, about 73%, about 74%, about 75%, about 76%, about 77%, about 78%, about 79%, about 80%, about 81%, about 82%, about 83%, about 84%, about 85%, about 86%, about 87%, about 88%, about 89%, about 90%, about 91%, about 92%, about 93%, about 94%, about 95%, about 96%, about 97%, about 98%, or about 99% nitrogen by weight.

[0126] In some embodiments, fertilizer of the present disclosure comprises about 5% to 50%, about 5% to 75%, about 10% to 50%, about 10% to 75%, about 15% to 50%, about 15% to 75%, about 20% to 50%, about 20% to 75%, about 25% to 50%, about 25% to 75%, about 30% to 50%, about 30% to 75%, about 35% to 50%, about 35% to 75%, about 40% to 50%, about 40% to 75%, about 45% to 50%, about 45% to 75%, or about 50% to 75% nitrogen by weight.

[0127] In some embodiments, the increase of nitrogen fixation and/or the production of 1% or more of the nitrogen in the plant are measured relative to control plants, which have not been exposed to the bacteria of the present disclosure. All increases or decreases in bacteria are measured relative to control bacteria. All increases or decreases in plants are measured relative to control plants.

[0128] As used herein, a “constitutive promoter” is a promoter, which is active under most conditions and/or during most development stages. There are several advantages to using constitutive promoters in expression vectors used in biotechnology, such as: high level of production of proteins used to select transgenic cells or organisms; high level of expression of reporter proteins or scorable markers, allowing easy detection and quantification; high level of production of a transcription factor that is part of a regulatory transcription system; production of compounds that requires ubiquitous activity in the organism; and production of compounds that are required during all stages of development. Non-limiting exemplary constitutive promoters include, CaMV 35S promoter, opine promoters, ubiquitin promoter, alcohol dehydrogenase promoter, etc.

[0129] As used herein, a “non-constitutive promoter” is a promoter which is active under certain conditions, in certain types of cells, and/or during certain development stages. For example, tissue specific, tissue preferred, cell type specific, cell type preferred, inducible promoters, and promoters under development control are non-constitutive promoters. Examples of promoters under developmental control include promoters that preferentially initiate transcription in certain tissues.

[0130] As used herein, “inducible” or “repressible” promoter is a promoter that is under chemical or environmental factor's control. Examples of environmental conditions that may affect transcription by inducible promoters include anaerobic conditions, certain chemicals, the presence of light, acidic or basic conditions, etc.

[0131] As used herein, a “tissue specific” promoter is a promoter that initiates transcription only in certain tissues. Unlike constitutive expression of genes, tissue-specific expression is the result of several interacting levels of gene regulation. As such, in the art sometimes it is preferable to use promoters from homologous or closely related species to achieve efficient and reliable expression of transgenes in particular tissues. This is one of the main reasons for the large amount of tissue-specific promoters isolated from particular tissues found in both scientific and patent literature.

[0132] As used herein, the term “operably linked” refers to the association of nucleic acid sequences on a single nucleic acid fragment so that the function of one is regulated by the other. For example, a promoter is operably linked with a coding sequence when it is capable of regulating the expression of that coding sequence (i.e., that the coding sequence is under the transcriptional control of the promoter). Coding sequences can be operably linked to regulatory sequences in a sense or antisense orientation. In another example, the complementary RNA regions of the disclosure can be operably linked, either directly or indirectly, 5′ to the target mRNA, or 3′ to the target mRNA, or within the target mRNA, or a first complementary region is 5′ and its complement is 3′ to the target mRNA.

[0133] In aspects, “applying to the plant a plurality of non-intergeneric bacteria,” includes any means by which the plant (including plant parts such as a seed, root, stem, tissue, etc.) is made to come into contact (i.e. exposed) with said bacteria at any stage of the plant's life cycle. Consequently, “applying to the plant a plurality of non-intergeneric bacteria,” includes any of the following means of exposing the plant (including plant parts such as a seed, root, stem, tissue, etc.) to said bacteria: spraying onto plant, dripping onto plant, applying as a seed coat, applying to a field that will then be planted with seed, applying to a field already planted with seed, applying to a field with adult plants, etc.

[0134] As used herein “MRTN” is an acronym for maximum return to nitrogen and is utilized as an experimental treatment in the Examples. MRTN was developed by Iowa State University and information can be found at: cnrc.agron.iastate.edu. The MRTN is the nitrogen rate where the economic net return to nitrogen application is maximized. The approach to calculating the MRTN is a regional approach for developing corn nitrogen rate guidelines in individual states. The nitrogen rate trial data was evaluated for Illinois, Iowa, Michigan, Minnesota, Ohio, and Wisconsin where an adequate number of research trials were available for corn plantings following soybean and corn plantings following corn. The trials were conducted with spring, sidedress, or split preplant/sidedress applied nitrogen, and sites were not irrigated except for those that were indicated for irrigated sands in Wisconsin. MRTN was developed by Iowa State University due to apparent differences in methods for determining suggested nitrogen rates required for corn production, misperceptions pertaining to nitrogen rate guidelines, and concerns about application rates. By calculating the MRTN, practitioners can determine the following: (1) the nitrogen rate where the economic net return to nitrogen application is maximized, (2) the economic optimum nitrogen rate, which is the point where the last increment of nitrogen returns a yield increase large enough to pay for the additional nitrogen, (3) the value of corn grain increase attributed to nitrogen application, and the maximum yield, which is the yield where application of more nitrogen does not result in a corn yield increase. Thus, the MRTN calculations provide practitioners with the means to maximize corn crops in different regions while maximizing financial gains from nitrogen applications.

[0135] The term mmol is an abbreviation for millimole, which is a thousandth (10^{-s}) of a mole, abbreviated herein as mol.

[0136] As used herein the terms “microorganism” or “microbe” should be taken broadly. These terms, used interchangeably, include but are not limited to, the two prokaryotic domains, Bacteria and Archaea. The term may also encompass eukaryotic fungi and protists.

[0137] The term “microbial consortia” or “microbial consortium” refers to a subset of a microbial community of individual microbial species, or strains of a species, which can be described as carrying out a common function, or can be described as participating in, or leading to, or correlating with, a recognizable parameter, such as a phenotypic trait of interest.

[0138] The term “microbial community” means a group of microbes comprising two or more species or strains. Unlike microbial consortia, a microbial community does not have to be carrying out a common function, or does not have to be participating in, or leading to, or correlating with, a recognizable parameter, such as a phenotypic trait of interest.

[0139] As used herein, “isolate,” “isolated,” “isolated microbe,” and like terms, are intended to mean that the one or more microorganisms has been separated from at least one of the materials with which it is associated in a particular environment (for example soil, water, plant tissue, etc.). Thus, an “isolated microbe” does not exist in its naturally occurring environment; rather, it is through the various techniques described herein that the microbe has been removed from its natural setting and placed into a non-naturally occurring state of existence. Thus, the isolated strain or isolated microbe may exist as, for example, a biologically pure culture, or as spores (or other forms of the strain). In aspects, the isolated microbe may be in association with an acceptable carrier, which may be an agriculturally acceptable carrier.

[0140] In certain aspects of the disclosure, the isolated microbes exist as “isolated and biologically pure cultures.” It will be appreciated by one of skill in the art that an isolated and biologically pure culture of a particular microbe denotes that said culture is substantially free of other living organisms and contains only the individual microbe in question. The culture can contain varying concentrations of said microbe. The present disclosure notes that isolated and biologically pure microbes often “necessarily differ from less pure or impure materials.” See, e.g. In re Bergstrom, 427 F.2d 1394, (CCPA 1970)(discussing purified prostaglandins), see also, In re Bergy, 596 F.2d 952 (CCPA 1979)(discussing purified microbes), see also, Parke-Davis & Co. v. H. K. Mulford & Co., 189 F. 95 (S.D.N.Y. 1911) (Learned Hand discussing purified adrenaline), aff'd in part, rev'd in part, 196 F. 496 (2d Cir. 1912), each of which are incorporated herein by reference. Furthermore, in some aspects, the disclosure provides for certain quantitative measures of the concentration, or purity limitations, that must be found within an isolated and biologically pure microbial culture. The presence of these purity values, in certain embodiments, is a further attribute that distinguishes the presently disclosed microbes from those microbes existing in a natural state. See, e.g., Merck & Co. v. Olin Mathieson Chemical Corp., 253 F.2d 156 (4th Cir. 1958) (discussing purity limitations for vitamin B12 produced by microbes), incorporated herein by reference.

[0141] As used herein, “individual isolates” should be taken to mean a composition, or culture, comprising a predominance of a single genera, species, or strain, of microorganism, following separation from one or more other microorganisms.

[0142] Microbes of the present disclosure may include spores and/or vegetative cells. In some embodiments, microbes of the present disclosure include microbes in a viable but non-culturable (VBNC) state. As used herein, “spore” or “spores” refer to structures produced by bacteria and fungi that are adapted for survival and dispersal. Spores are generally characterized as dormant structures; however, spores are capable of differentiation through the process of germination. Germination is the differentiation of spores into vegetative cells that are capable of metabolic activity, growth, and reproduction. The germination of a single spore results in a single fungal or bacterial vegetative cell. Fungal spores are units of asexual reproduction, and in some cases are necessary structures in fungal life cycles. Bacterial spores are structures for surviving conditions that may ordinarily be nonconducive to the survival or growth of vegetative cells.

[0143] As used herein, “microbial composition” refers to a composition comprising one or more microbes of the present disclosure. In some embodiments, a microbial composition is administered to plants (including various plant parts) and/or in agricultural fields.

[0144] As used herein, “carrier,” “acceptable carrier,” or “agriculturally acceptable carrier” refers to a diluent, adjuvant, excipient, or vehicle with which the microbe can be administered, which does not detrimentally effect the microbe.

### Regulation of Nitrogen Fixation

[0145] In some cases, nitrogen fixation pathway may act as a target for genetic engineering and optimization. One trait that may be targeted for regulation by the methods described herein is nitrogen fixation. Nitrogen fertilizer is the largest operational expense on a farm and the biggest driver of higher yields in row crops like corn and wheat. Described herein are microbial products that can deliver renewable forms of nitrogen in non-leguminous crops. While some endophytes have the genetics necessary for fixing nitrogen in pure culture, the fundamental technical challenge is that wild-type endophytes of cereals and grasses stop fixing nitrogen in fertilized fields. The application of chemical fertilizers and residual nitrogen levels in field soils signal the microbe to shut down the biochemical pathway for nitrogen fixation.

[0146] Changes to the transcriptional and post-translational levels of components of the nitrogen fixation regulatory network may be beneficial to the development of a microbe capable of fixing and transferring nitrogen to corn in the presence of fertilizer. To that end, described herein is Host-Microbe Evolution (HoME) technology to precisely evolve regulatory networks and elicit novel phenotypes. Also described herein are unique, proprietary libraries of nitrogen-fixing endophytes isolated from corn, paired with extensive omics data surrounding the interaction of microbes and host plant under different environmental conditions like nitrogen stress and excess. In some embodiments, this technology enables precision evolution of the genetic regulatory network of endophytes to produce microbes that actively fix nitrogen even in the presence of fertilizer in the field. Also described herein are evaluations of the technical potential of evolving microbes that colonize corn root tissues and produce nitrogen for fertilized plants and evaluations of the compatibility of endophytes with standard formulation practices and diverse soils to determine feasibility of integrating the microbes into modern nitrogen management strategies.

[0147] In order to utilize elemental nitrogen (N) for chemical synthesis, life forms combine nitrogen gas (N₂) available in the atmosphere with hydrogen in a process known as nitrogen fixation. Because of the energy-intensive nature of biological nitrogen fixation, diazotrophs (bacteria and archaea that fix atmospheric nitrogen gas) have evolved sophisticated and tight regulation of the nif gene cluster in response to environmental oxygen and available nitrogen. Nif genes encode enzymes involved in nitrogen fixation (such as the nitrogenase complex) and proteins that regulate nitrogen fixation. Shamseldin (2013. Global J. Biotechnol. Biochem. 8(4):84-94) discloses detailed descriptions of nif genes and their products, and is incorporated herein by reference. Described herein are methods of producing a plant with an improved trait comprising isolating bacteria from a first plant, introducing a genetic variation into a gene of the isolated bacteria to increase nitrogen fixation, exposing a second plant to the variant bacteria, isolating bacteria from the second plant having an improved trait relative to the first plant, and repeating the steps with bacteria isolated from the second plant.

[0148] In Proteobacteria, regulation of nitrogen fixation centers around the σ₅₄-dependent enhancer-binding protein NifA, the positive transcriptional regulator of the nif cluster. Intracellular levels of active NifA are controlled by two key factors: transcription of the nifLA operon, and inhibition of NifA activity by protein-protein interaction with NifL. Both of these processes are responsive to intracellular glutamine levels via the PII protein signaling cascade. This cascade is mediated by GlnD, which directly senses glutamine and catalyzes the uridylylation or deuridylylation of two PII regulatory proteins—GlnB and GlnK—in response the absence or presence, respectively, of bound glutamine. Under conditions of nitrogen excess, unmodified GlnB signals the deactivation of the nifLA promoter. However, under conditions of nitrogen limitation, GlnB is post-translationally modified, which inhibits its activity and leads to transcription of the nifLA operon. In this way, nifLA transcription is tightly controlled in response to environmental nitrogen via the PII protein signaling cascade. On the post-translational level of NifA regulation, GlnK inhibits the NifL/NifA interaction in a matter dependent on the overall level of free GlnK within the cell.

[0149] NifA is transcribed from the nifLA operon, whose promoter is activated by phosphorylated NtrC, another σ₅₄-dependent regulator. The phosphorylation state of NtrC is mediated by the histidine kinase NtrB, which interacts with deuridylylated GlnB but not uridylylated GlnB. Under conditions of nitrogen excess, a high intracellular level of glutamine leads to deuridylylation of GlnB, which then interacts with NtrB to deactivate its phosphorylation activity and activate its phosphatase activity, resulting in dephosphorylation of NtrC and the deactivation of the nifLA promoter. However, under conditions of nitrogen limitation, a low level of intracellular glutamine results in uridylylation of GlnB, which inhibits its interaction with NtrB and allows the phosphorylation of NtrC and transcription of the nifLA operon. In this way, nifLA expression is tightly controlled in response to environmental nitrogen via the PII protein signaling cascade. nifA, ntrB, ntrC, and glnB, are all genes that can be mutated in the methods described herein. These processes may also be responsive to intracellular or extracellular levels of ammonia, urea or nitrates.

[0150] The activity of NifA is also regulated post-translationally in response to environmental nitrogen, most typically through NifL-mediated inhibition of NifA activity. In general, the interaction of NifL and NifA is influenced by the PII protein signaling cascade via GlnK, although the nature of the interactions between GlnK and NifL/NifA varies significantly between diazotrophs. In Klebsiella pneumoniae, both forms of GlnK inhibit the NifL/NifA interaction, and the interaction between GlnK and NifL/NifA is determined by the overall level of free GlnK within the cell. Under nitrogen-excess conditions, deuridylylated GlnK interacts with the ammonium transporter AmtB, which serves to both block ammonium uptake by AmtB and sequester GlnK to the membrane, allowing inhibition of NifA by NifL. On the other hand, in Azotobacter vinelandii, interaction with deuridylylated GlnK is required for the NifL/NifA interaction and NifA inhibition, while uridylylation of GlnK inhibits its interaction with NifL. In diazotrophs lacking the nifL gene, there is evidence that NifA activity is inhibited directly by interaction with the deuridylylated forms of both GlnK and GlnB under nitrogen-excess conditions. In some bacteria the Nif cluster may be regulated by glnR, and further in some cases this may comprise negative regulation. Regardless of the mechanism, post-translational inhibition of NifA is an important regulator of the nif cluster in most known diazotrophs. Additionally, nifL, amtB, glnK, and glnR are genes that can be mutated in the methods described herein.

[0151] In addition to regulating the transcription of the nif gene cluster, many diazotrophs have evolved a mechanism for the direct post-translational modification and inhibition of the nitrogenase enzyme itself, known as nitrogenase shutoff. This is mediated by ADP-ribosylation of the Fe protein (NifH) under nitrogen-excess conditions, which disrupts its interaction with the MoFe protein complex (NifDK) and abolishes nitrogenase activity. DraT catalyzes the ADP-ribosylation of the Fe protein and shutoff of nitrogenase, while DraG catalyzes the removal of ADP-ribose and reactivation of nitrogenase. As with nifLA transcription and NifA inhibition, nitrogenase shutoff is also regulated via the PII protein signaling cascade. Under nitrogen-excess conditions, deuridylylated GlnB interacts with and activates DraT, while deuridylylated GlnK interacts with both DraG and AmtB to form a complex, sequestering DraG to the membrane. Under nitrogen-limiting conditions, the uridylylated forms of GlnB and GlnK do not interact with DraT and DraG, respectively, leading to the inactivation of DraT and the diffusion of DraG to the Fe protein, where it removes the ADP-ribose and activates nitrogenase. The methods described herein also contemplate introducing genetic variation into the nifH, nifD, nifK, and draT genes.

[0152] Although some endophytes have the ability to fix nitrogen in vitro, often the genetics are silenced in the field by high levels of exogenous chemical fertilizers. One can decouple the sensing of exogenous nitrogen from expression of the nitrogenase enzyme to facilitate field-based nitrogen fixation. Improving the integral of nitrogenase activity across time further serves to augment the production of nitrogen for utilization by the crop. Specific targets for genetic variation to facilitate field-based nitrogen fixation using the methods described herein include one or more genes selected from the group consisting of nifA, nifL, ntrB, ntrC, glnA, glnB, glnK, draT, amtB, glnD, glnE, nifJ, nifH, nifD, nifK, nifY, nifE, nifN, nifU, nifS, nifV, nifW, nifZ, nifM, nifF, nifB, and nifQ.

[0153] An additional target for genetic variation to facilitate field-based nitrogen fixation using the methods described herein is the NifA protein. The NifA protein is typically the activator for expression of nitrogen fixation genes. Increasing the production of NifA (either constitutively or during high ammonia condition) circumvents the native ammonia-sensing pathway. In addition, reducing the production of NifL proteins, a known inhibitor of NifA, also leads to an increased level of freely active NifA. In addition, increasing the transcription level of the nifAL operon (either constitutively or during high ammonia condition) also leads to an overall higher level of NifA proteins. Elevated level of nifAL expression is achieved by altering the promoter itself or by reducing the expression of NtrB (part of ntrB and ntrC signaling cascade that originally would result in the shutoff of nifAL operon during high nitrogen condition). High level of NifA achieved by these or any other methods described herein increases the nitrogen fixation activity of the endophytes.

[0154] Another target for genetic variation to facilitate field-based nitrogen fixation using the methods described herein is the GlnD/GlnB/GlnK PII signaling cascade. The intracellular glutamine level is sensed through the GlnD/GlnB/GlnK PII signaling cascade. Active site mutations in GlnD that abolish the uridylyl-removing activity of GlnD disrupt the nitrogen-sensing cascade. In addition, reduction of the GlnB concentration short circuits the glutamine-sensing cascade. These mutations “trick” the cells into perceiving a nitrogen-limited state, thereby increasing the nitrogen fixation level activity. These processes may also be responsive to intracellular or extracellular levels of ammonia, urea or nitrates.

[0155] The amtB protein is also a target for genetic variation to facilitate field-based nitrogen fixation using the methods described herein. Ammonia uptake from the environment can be reduced by decreasing the expression level of amtB protein. Without intracellular ammonia, the endophyte is not able to sense the high level of ammonia, preventing the down-regulation of nitrogen fixation genes. Any ammonia that manages to get into the intracellular compartment is converted into glutamine. Intracellular glutamine level is the major currency of nitrogen sensing. Decreasing the intracellular glutamine level prevents the cells from sensing high ammonium levels in the environment. This effect can be achieved by increasing the expression level of glutaminase, an enzyme that converts glutamine into glutamate. In addition, intracellular glutamine can also be reduced by decreasing glutamine synthase (an enzyme that converts ammonia into glutamine). In diazotrophs, fixed ammonia is quickly assimilated into glutamine and glutamate to be used for cellular processes. Disruptions to ammonia assimilation may enable diversion of fixed nitrogen to be exported from the cell as ammonia. The fixed ammonia is predominantly assimilated into glutamine by glutamine synthetase (GS), encoded by glnA, and subsequently into glutamine by glutamine oxoglutarate aminotransferase (GOGAT). In some examples, glnS encodes a glutamine synthetase. GS is regulated post-translationally by GS adenylyl transferase (GlnE), a bi-functional enzyme encoded by glnE that catalyzes both the adenylylation and de-adenylylation of GS through activity of its adenylyl-transferase (AT) and adenylyl-removing (AR) domains, respectively. Under nitrogen limiting conditions, glnA is expressed, and GlnE's AR domain de-adynylylates GS, allowing it to be active. Under conditions of nitrogen excess, glnA expression is turned off, and GlnE's AT domain is activated allosterically by glutamine, causing the adenylylation and deactivation of GS.

[0156] Furthermore, the draT gene may also be a target for genetic variation to facilitate field-based nitrogen fixation using the methods described herein. Once nitrogen fixing enzymes are produced by the cell, nitrogenase shut-off represents another level in which cell downregulates fixation activity in high nitrogen condition. This shut-off could be removed by decreasing the expression level of DraT.

[0157] Methods for imparting new microbial phenotypes can be performed at the transcriptional, translational, and post-translational levels. The transcriptional level includes changes at the promoter (such as changing sigma factor affinity or binding sites for transcription factors, including deletion of all or a portion of the promoter) or changing transcription terminators and attenuators. The translational level includes changes at the ribosome binding sites and changing mRNA degradation signals. The post-translational level includes mutating an enzyme's active site and changing protein-protein interactions. These changes can be achieved in a multitude of ways. Reduction of expression level (or complete abolishment) can be achieved by swapping the native ribosome binding site (RBS) or promoter with another with lower strength/efficiency. ATG start sites can be swapped to a GTG, TTG, or CTG start codon, which results in reduction in translational activity of the coding region. Complete abolishment of expression can be done by knocking out (deleting) the coding region of a gene. Frameshifting the open reading frame (ORF) likely will result in a premature stop codon along the ORF, thereby creating a non-functional truncated product. Insertion of in-frame stop codons will also similarly create a non-functional truncated product. Addition of a degradation tag at the N or C terminal can also be done to reduce the effective concentration of a particular gene.

[0158] Conversely, expression level of the genes described herein can be achieved by using a stronger promoter. To ensure high promoter activity during high nitrogen level condition (or any other condition), a transcription profile of the whole genome in a high nitrogen level condition could be obtained and active promoters with a desired transcription level can be chosen from that dataset to replace the weak promoter. Weak start codons can be swapped out with an ATG start codon for better translation initiation efficiency. Weak ribosomal binding sites (RBS) can also be swapped out with a different RBS with higher translation initiation efficiency. In addition, site specific mutagenesis can also be performed to alter the activity of an enzyme.

[0159] Increasing the level of nitrogen fixation that occurs in a plant can lead to a reduction in the amount of chemical fertilizer needed for crop production and reduce greenhouse gas emissions (e.g., nitrous oxide).

### Regulation of Colonization Potential

[0160] One trait that may be targeted for regulation by the methods described herein is colonization potential. Accordingly, in some embodiments, pathways and genes involved in colonization may act as a target for genetic engineering and optimization.

[0161] In some cases, exopolysaccharides may be involved in bacterial colonization of plants. In some cases, plant colonizing microbes may produce a biofilm. In some cases, plant colonizing microbes secrete molecules which may assist in adhesion to the plant, or in evading a plant immune response. In some cases, plant colonizing microbes may excrete signaling molecules which alter the plants response to the microbes. In some cases, plant colonizing microbes may secrete molecules which alter the local microenvironment. In some cases, a plant colonizing microbe may alter expression of genes to adapt to a plant said microbe is in proximity to. In some cases, a plant colonizing microbe may detect the presence of a plant in the local environment and may change expression of genes in response.

[0162] In some embodiments, to improve colonization, a gene involved in a pathway selected from the group consisting of: exopolysaccharide production, endo-polygalaturonase production, trehalose production, and glutamine conversion may be targeted for genetic engineering and optimization.

[0163] In some embodiments, an enzyme or pathway involved in production of exopolysaccharides may be genetically modified to improve colonization. Exemplary genes encoding an exopolysaccharide producing enzyme that may be targeted to improve colonization include, but are not limited to, bcsii, bcsiii, and yjbE.

[0164] In some embodiments, an enzyme or pathway involved in production of a filamentous hemagglutinin may be genetically modified to improve colonization. For example, a fhaB gene encoding a filamentous hemagglutinin may be targeted to improve colonization.

[0165] In some embodiments, an enzyme or pathway involved in production of an endo-polygalaturonase may be genetically modified to improve colonization. For example, a pehA gene encoding an endo-polygalaturonase precursor may be targeted to improve colonization.

[0166] In some embodiments, an enzyme or pathway involved in production of trehalose may be genetically modified to improve colonization. Exemplary genes encoding a trehalose producing enzyme that may be targeted to improve colonization include, but are not limited to, otsB and treZ.

[0167] In some embodiments, an enzyme or pathway involved in conversion of glutamine may be genetically modified to improve colonization. For example, the glsA2 gene encodes a glutaminase which converts glutamine into ammonium and glutamate. Upregulating glsA2 improves fitness by increasing the cell's glutamate pool, thereby increasing available N to the cells. Accordingly, in some embodiments, the glsA2 gene may be targeted to improve colonization.

[0168] In some embodiments, colonization genes selected from the group consisting of: bcsii, bcsiii, yjbE, fhaB, pehA, otsB, treZ, glsA2, and combinations thereof, may be genetically modified to improve colonization.

[0169] Colonization genes that may be targeted to improve the colonization potential are also described in a PCT publication, WO/2019/032926, which is incorporated by reference herein in its entirety.

### Generation of Bacterial Populations

### Isolation of Bacteria

[0170] Microbes useful in methods and compositions disclosed herein can be obtained by extracting microbes from surfaces or tissues of native plants. Microbes can be obtained by grinding seeds to isolate microbes. Microbes can be obtained by planting seeds in diverse soil samples and recovering microbes from tissues. Additionally, microbes can be obtained by inoculating plants with exogenous microbes and determining which microbes appear in plant tissues. Non-limiting examples of plant tissues may include a seed, seedling, leaf, cutting, plant, bulb, or tuber.

[0171] A method of obtaining microbes may be through the isolation of bacteria from soils. Bacteria may be collected from various soil types. In some example, the soil can be characterized by traits such as high or low fertility, levels of moisture, levels of minerals, and various cropping practices. For example, the soil may be involved in a crop rotation where different crops are planted in the same soil in successive planting seasons. The sequential growth of different crops on the same soil may prevent disproportionate depletion of certain minerals. The bacteria can be isolated from the plants growing in the selected soils. The seedling plants can be harvested at 2-6 weeks of growth. For example, at least 400 isolates can be collected in a round of harvest. Soil and plant types reveal the plant phenotype as well as the conditions, which allow for the downstream enrichment of certain phenotypes.

[0172] Microbes can be isolated from plant tissues to assess microbial traits. The parameters for processing tissue samples may be varied to isolate different types of associative microbes, such as rhizopheric bacteria, epiphytes, or endophytes. The isolates can be cultured in nitrogen-free media to enrich for bacteria that perform nitrogen fixation. Alternatively, microbes can be obtained from global strain banks.

[0173] In planta analytics are performed to assess microbial traits. In some embodiments, the plant tissue can be processed for screening by high throughput processing for DNA and RNA. Additionally, non-invasive measurements can be used to assess plant characteristics, such as colonization. Measurements on wild microbes can be obtained on a plant-by-plant basis. Measurements on wild microbes can also be obtained in the field using medium throughput methods. Measurements can be done successively over time. Model plant system can be used including, but not limited to, Setaria.

[0174] Microbes in a plant system can be screened via transcriptional profiling of a microbe in a plant system. Examples of screening through transcriptional profiling are using methods of quantitative polymerase chain reaction (qPCR), molecular barcodes for transcript detection, Next Generation Sequencing, and microbe tagging with fluorescent markers. Impact factors can be measured to assess colonization in the greenhouse including, but not limited to, microbiome, abiotic factors, soil conditions, oxygen, moisture, temperature, inoculum conditions, and root localization. Nitrogen fixation can be assessed in bacteria by measuring 15N gas/fertilizer (dilution) with IRMS or NanoSIMS as described herein NanoSIMS is high-resolution secondary ion mass spectrometry. The NanoSIMS technique is a way to investigate chemical activity from biological samples. The catalysis of reduction of oxidation reactions that drive the metabolism of microorganisms can be investigated at the cellular, subcellular, molecular and elemental level. NanoSIMS can provide high spatial resolution of greater than 0.1 μm. NanoSIMS can detect the use of isotope tracers such as ¹³C, ¹⁵N, and ¹⁸O. Therefore, NanoSIMS can be used to the chemical activity nitrogen in the cell.

[0175] Automated greenhouses can be used for in planta analytics. Plant metrics in response to microbial exposure include, but are not limited to, biomass, chloroplast analysis, CCD camera, volumetric tomography measurements.

[0176] One way of enriching a microbe population is according to genotype. For example, a polymerase chain reaction (PCR) assay with a targeted primer or specific primer. Primers designed for the nifH gene can be used to identity diazotrophs because diazotrophs express the nifH gene in the process of nitrogen fixation. A microbial population can also be enriched via single-cell culture-independent approaches and chemotaxis-guided isolation approaches. Alternatively, targeted isolation of microbes can be performed by culturing the microbes on selection media. Premeditated approaches to enriching microbial populations for desired traits can be guided by bioinformatics data and are described herein.

Enriching for Microbes with Nitrogen Fixation Capabilities Using Bioinformatics

[0177] Bioinformatics tools can be used to identify and isolate plant growth promoting rhizobacteria (PGPRs), which are selected based on their ability to perform nitrogen fixation. Microbes with high nitrogen fixing ability can promote favorable traits in plants. Bioinformatic modes of analysis for the identification of PGPRs include, but are not limited to, genomics, metagenomics, targeted isolation, gene sequencing, transcriptome sequencing, and modeling.

[0178] Genomics analysis can be used to identify PGPRs and confirm the presence of mutations with methods of Next Generation Sequencing as described herein and microbe version control.

[0179] Metagenomics can be used to identify and isolate PGPR using a prediction algorithm for colonization. Metadata can also be used to identify the presence of an engineered strain in environmental and greenhouse samples.

[0180] Transcriptomic sequencing can be used to predict genotypes leading to PGPR phenotypes. Additionally, transcriptomic data is used to identify promoters for altering gene expression. Transcriptomic data can be analyzed in conjunction with the Whole Genome Sequence (WGS) to generate models of metabolism and gene regulatory networks.

### Domestication of Microbes

[0181] Microbes isolated from nature can undergo a domestication process wherein the microbes are converted to a form that is genetically trackable and identifiable. One way to domesticate a microbe is to engineer it with antibiotic resistance. The process of engineering antibiotic resistance can begin by determining the antibiotic sensitivity in the wild type microbial strain. If the bacteria are sensitive to the antibiotic, then the antibiotic can be a good candidate for antibiotic resistance engineering. Subsequently, an antibiotic resistant gene or a counterselectable suicide vector can be incorporated into the genome of a microbe using recombineering methods. A counterselectable suicide vector may consist of a deletion of the gene of interest, a selectable marker, and the counterselectable marker sacB. Counterselection can be used to exchange native microbial DNA sequences with antibiotic resistant genes. A medium throughput method can be used to evaluate multiple microbes simultaneously allowing for parallel domestication. Alternative methods of domestication include the use of homing nucleases to prevent the suicide vector sequences from looping out or from obtaining intervening vector sequences.

[0182] DNA vectors can be introduced into bacteria via several methods including electroporation and chemical transformations. A standard library of vectors can be used for transformations. An example of a method of gene editing is CRISPR preceded by Cas9 testing to ensure activity of Cas9 in the microbes.

### Non-Transgenic Engineering of Microbes

[0183] A microbial population with favorable traits can be obtained via directed evolution. Direct evolution is an approach wherein the process of natural selection is mimicked to evolve proteins or nucleic acids towards a user-defined goal. An example of direct evolution is when random mutations are introduced into a microbial population, the microbes with the most favorable traits are selected, and the growth of the selected microbes is continued. The most favorable traits in growth promoting rhizobacteria (PGPRs) may be in nitrogen fixation. The method of directed evolution may be iterative and adaptive based on the selection process after each iteration.

[0184] Plant growth promoting rhizobacteria (PGPRs) with high capability of nitrogen fixation can be generated. The evolution of PGPRs can be carried out via the introduction of genetic variation. Genetic variation can be introduced via polymerase chain reaction mutagenesis, oligonucleotide-directed mutagenesis, saturation mutagenesis, fragment shuffling mutagenesis, homologous recombination, CRISPR/Cas9 systems, chemical mutagenesis, and combinations thereof. These approaches can introduce random mutations into the microbial population. For example, mutants can be generated using synthetic DNA or RNA via oligonucleotide-directed mutagenesis. Mutants can be generated using tools contained on plasmids, which are later cured. Genes of interest can be identified using libraries from other species with improved traits including, but not limited to, improved PGPR properties, improved colonization of cereals, increased oxygen sensitivity, increased nitrogen fixation, and increased ammonia excretion. Intrageneric genes can be designed based on these libraries using software such as Geneious or Platypus design software. Mutations can be designed with the aid of machine learning. Mutations can be designed with the aid of a metabolic model. Automated design of the mutation can be done using a la Platypus and will guide RNAs for Cas-directed mutagenesis.

[0185] The intra-generic genes can be transferred into the host microbe. Additionally, reporter systems can also be transferred to the microbe. The reporter systems characterize promoters, determine the transformation success, screen mutants, and act as negative screening tools.

[0186] The microbes carrying the mutation can be cultured via serial passaging. A microbial colony contains a single variant of the microbe. Microbial colonies are screened with the aid of an automated colony picker and liquid handler. Mutants with gene duplication and increased copy number express a higher genotype of the desired trait.

### Selection of Plant Growth Promoting Microbes Based on Nitrogen Fixation

[0187] The microbial colonies can be screened using various assays to assess nitrogen fixation. One way to measure nitrogen fixation is via a single fermentative assay, which measures nitrogen excretion. An alternative method is the acetylene reduction assay (ARA) with in-line sampling over time. ARA can be performed in high throughput plates of microtube arrays. ARA can be performed with live plants and plant tissues. The media formulation and media oxygen concentration can be varied in ARA assays. Another method of screening microbial variants is by using biosensors. The use of NanoSIMS and Raman microspectroscopy can be used to investigate the activity of the microbes. In some cases, bacteria can also be cultured and expanded using methods of fermentation in bioreactors. The bioreactors are designed to improve robustness of bacteria growth and to decrease the sensitivity of bacteria to oxygen. Medium to high TP plate-based microfermentors are used to evaluate oxygen sensitivity, nutritional needs, nitrogen fixation, and nitrogen excretion. The bacteria can also be co-cultured with competitive or beneficial microbes to elucidate cryptic pathways. Flow cytometry can be used to screen for bacteria that produce high levels of nitrogen using chemical, colorimetric, or fluorescent indicators. The bacteria may be cultured in the presence or absence of a nitrogen source. For example, the bacteria may be cultured with glutamine, ammonia, urea or nitrates.

### Guided Microbial Remodeling—An Overview

[0188] Guided microbial remodeling is a method to systematically identify and improve the role of species within the crop microbiome. In some aspects, and according to a particular methodology of grouping/categorization, the method comprises three steps: 1) selection of candidate species by mapping plant-microbe interactions and predicting regulatory networks linked to a particular phenotype, 2) pragmatic and predictable improvement of microbial phenotypes through intra-species crossing of regulatory networks and gene clusters within a microbe's genome, and 3) screening and selection of new microbial genotypes that produce desired crop phenotypes.

[0189] To systematically assess the improvement of strains, a model is created that links colonization dynamics of the microbial community to genetic activity by key species. The model is used to predict genetic targets for non-intergeneric genetic remodeling (i.e. engineering the genetic architecture of the microbe in a non-transgenic fashion). See, FIG. 1A for a graphical representation of an embodiment of the process.

[0190] As illustrated in FIG. 1A, rational improvement of the crop microbiome may be used to increase soil biodiversity, tune impact of keystone species, and/or alter timing and expression of important metabolic pathways.

[0191] To this end, the inventors have developed a platform to identify and improve the role of strains within the crop microbiome. In some aspects, the inventors call this process microbial breeding.

[0192] The aforementioned “Guided Microbial Remodeling” process will be further elaborated upon in the Examples, for instance in Example 1, entitled: “Guided Microbial Remodeling—A Platform for the Rational Improvement of Microbial Species for Agriculture.”

### Serial Passage

[0193] Production of bacteria to improve plant traits (e.g., nitrogen fixation) can be achieved through serial passage. The production of these bacteria can be done by selecting plants, which have a particular improved trait that is influenced by the microbial flora, in addition to identifying bacteria and/or compositions that are capable of imparting one or more improved traits to one or more plants. One method of producing a bacteria to improve a plant trait includes the steps of: (a) isolating bacteria from tissue or soil of a first plant; (b) introducing a genetic variation into one or more of the bacteria to produce one or more variant bacteria; (c) exposing a plurality of plants to the variant bacteria; (d) isolating bacteria from tissue or soil of one of the plurality of plants, wherein the plant from which the bacteria is isolated has an improved trait relative to other plants in the plurality of plants; and (e) repeating steps (b) to (d) with bacteria isolated from the plant with an improved trait (step (d)). Steps (b) to (d) can be repeated any number of times (e.g., once, twice, three times, four times, five times, ten times, or more) until the improved trait in a plant reaches a desired level. Further, the plurality of plants can be more than two plants, such as 10 to 20 plants, or 20 or more, 50 or more, 100 or more, 300 or more, 500 or more, or 1000 or more plants.

[0194] In addition to obtaining a plant with an improved trait, a bacterial population comprising bacteria comprising one or more genetic variations introduced into one or more genes (e.g., genes regulating nitrogen fixation) is obtained. By repeating the steps described above, a population of bacteria can be obtained that include the most appropriate members of the population that correlate with a plant trait of interest. The bacteria in this population can be identified and their beneficial properties determined, such as by genetic and/or phenotypic analysis. Genetic analysis may occur of isolated bacteria in step (a). Phenotypic and/or genotypic information may be obtained using techniques including: high through-put screening of chemical components of plant origin, sequencing techniques including high throughput sequencing of genetic material, differential display techniques (including DDRT-PCR, and DD-PCR), nucleic acid microarray techniques, RNA-sequencing (Whole Transcriptome Shotgun Sequencing), and qRT-PCR (quantitative real time PCR). Information gained can be used to obtain community profiling information on the identity and activity of bacteria present, such as phylogenetic analysis or microarray-based screening of nucleic acids coding for components of rRNA operons or other taxonomically informative loci. Examples of taxonomically informative loci include 16S rRNA gene, 23S rRNA gene, 5S rRNA gene, 5.8S rRNA gene, 12S rRNA gene, 18S rRNA gene, 28S rRNA gene, gyrB gene, rpoB gene, fusA gene, recA gene, coxl gene, nifD gene. Example processes of taxonomic profiling to determine taxa present in a population are described in US20140155283. Bacterial identification may comprise characterizing activity of one or more genes or one or more signaling pathways, such as genes associated with the nitrogen fixation pathway. Synergistic interactions (where two components, by virtue of their combination, increase a desired effect by more than an additive amount) between different bacterial species may also be present in the bacterial populations.

### Genetic Variation—Locations and Sources of Genomic Alteration

[0195] The genetic variation may be a variation in a gene selected from the group consisting of: nifA, nifL, ntrB, ntrC, glnA, glnB, glnK, draT, amtB, glnD, glnE, nifJ, nifH, nifD, nifK, nifY, nifE, nifN, nifU, nifS, nifV, nifW, nifZ, nifM, nifF, nifB, and nifQ. The genetic variation may be a variation in a gene encoding a protein with functionality selected from the group consisting of: glutamine synthetase, glutaminase, glutamine synthetase adenylyltransferase, transcriptional activator, anti-transcriptional activator, pyruvate flavodoxin oxidoreductase, flavodoxin, or NAD+-dinitrogen-reductase aDP-D-ribosyltransferase. The genetic variation may be a mutation that results in one or more of: increased expression or activity of NifA or glutaminase; decreased expression or activity of NifL, NtrB, glutamine synthetase, GlnB, GlnK, DraT, AmtB; decreased adenylyl-removing activity of GlnE; or decreased uridylyl-removing activity of GlnD. The genetic variation may be a variation in a gene selected from the group consisting of: bcsii, bcsiii, yjbE, fhaB, pehA, otsB, treZ, glsA2, and combinations thereof. In some embodiments, a genetic variation may be a variation in any of the genes described throughout this disclosure.

[0196] Introducing a genetic variation may comprise insertion and/or deletion of one or more nucleotides at a target site, such as 1, 2, 3, 4, 5, 10, 25, 50, 100, 250, 500, or more nucleotides. The genetic variation introduced into one or more bacteria of the methods disclosed herein may be a knock-out mutation (e.g. deletion of a promoter, insertion or deletion to produce a premature stop codon, deletion of an entire gene), or it may be elimination or abolishment of activity of a protein domain (e.g. point mutation affecting an active site, or deletion of a portion of a gene encoding the relevant portion of the protein product), or it may alter or abolish a regulatory sequence of a target gene. One or more regulatory sequences may also be inserted, including heterologous regulatory sequences and regulatory sequences found within a genome of a bacterial species or genus corresponding to the bacteria into which the genetic variation is introduced. Moreover, regulatory sequences may be selected based on the expression level of a gene in a bacterial culture or within a plant tissue. The genetic variation may be a pre-determined genetic variation that is specifically introduced to a target site. The genetic variation may be a random mutation within the target site. The genetic variation may be an insertion or deletion of one or more nucleotides. In some cases, a plurality of different genetic variations (e.g. 2, 3, 4, 5, 10, or more) are introduced into one or more of the isolated bacteria before exposing the bacteria to plants for assessing trait improvement. The plurality of genetic variations can be any of the above types, the same or different types, and in any combination. In some cases, a plurality of different genetic variations are introduced serially, introducing a first genetic variation after a first isolation step, a second genetic variation after a second isolation step, and so forth so as to accumulate a plurality of genetic variations in bacteria imparting progressively improved traits on the associated plants.

### Genetic Variation—Methods of Introducing Genomic Alteration

[0197] In general, the term “genetic variation” refers to any change introduced into a polynucleotide sequence relative to a reference polynucleotide, such as a reference genome or portion thereof, or reference gene or portion thereof. A genetic variation may be referred to as a “mutation,” and a sequence or organism comprising a genetic variation may be referred to as a “genetic variant” or “mutant”. Genetic variations can have any number of effects, such as the increase or decrease of some biological activity, including gene expression, metabolism, and cell signaling. Genetic variations can be specifically introduced to a target site, or introduced randomly. A variety of molecular tools and methods are available for introducing genetic variation. For example, genetic variation can be introduced via polymerase chain reaction mutagenesis, oligonucleotide-directed mutagenesis, saturation mutagenesis, fragment shuffling mutagenesis, homologous recombination, recombineering, lambda red mediated recombination, CRISPR/Cas9 systems, chemical mutagenesis, and combinations thereof. Chemical methods of introducing genetic variation include exposure of DNA to a chemical mutagen, e.g., ethyl methanesulfonate (EMS), methyl methanesulfonate (MMS), N-nitrosourea (EN U), N-methyl-N-nitro-N′-nitrosoguanidine, 4-nitroquinoline N-oxide, diethylsulfate, benzopyrene, cyclophosphamide, bleomycin, triethylmelamine, acrylamide monomer, nitrogen mustard, vincristine, diepoxyalkanes (for example, diepoxybutane), ICR-170, formaldehyde, procarbazine hydrochloride, ethylene oxide, dimethylnitrosamine, 7,12 dimethylbenz(a)anthracene, chlorambucil, hexamethylphosphoramide, bisulfan, and the like. Radiation mutation-inducing agents include ultraviolet radiation, γ-irradiation, X-rays, and fast neutron bombardment. Genetic variation can also be introduced into a nucleic acid using, e.g., trimethylpsoralen with ultraviolet light. Random or targeted insertion of a mobile DNA element, e.g., a transposable element, is another suitable method for generating genetic variation. Genetic variations can be introduced into a nucleic acid during amplification in a cell-free in vitro system, e.g., using a polymerase chain reaction (PCR) technique such as error-prone PCR. Genetic variations can be introduced into a nucleic acid in vitro using DNA shuffling techniques (e.g., exon shuffling, domain swapping, and the like). Genetic variations can also be introduced into a nucleic acid as a result of a deficiency in a DNA repair enzyme in a cell, e.g., the presence in a cell of a mutant gene encoding a mutant DNA repair enzyme is expected to generate a high frequency of mutations (i.e., about 1 mutation/100 genes-1 mutation/10,000 genes) in the genome of the cell. Examples of genes encoding DNA repair enzymes include but are not limited to Mut H, Mut S, Mut L, and Mut U, and the homologs thereof in other species (e.g., MSH 1 6, PMS 1 2, MLH 1, GTBP, ERCC-1, and the like). Example descriptions of various methods for introducing genetic variations are provided in e.g., Stemple (2004) Nature 5:1-7; Chiang et al. (1993) PCR Methods Appl 2(3): 210-217; Stemmer (1994) Proc. Natl. Acad. Sci. USA 91:10747-10751; and U.S. Pat. Nos. 6,033,861, and 6,773,900.

[0198] Genetic variations introduced into microbes may be classified as transgenic, cisgenic, intragenomic, intrageneric, intergeneric, synthetic, evolved, rearranged, or SNPs.

[0199] Genetic variation may be introduced into numerous metabolic pathways within microbes to elicit improvements in the traits described above. Representative pathways include sulfur uptake pathways, glycogen biosynthesis, the glutamine regulation pathway, the molybdenum uptake pathway, the nitrogen fixation pathway, ammonia assimilation, ammonia excretion or secretion, Nitrogen uptake, glutamine biosynthesis, annamox, phosphate solubilization, organic acid transport, organic acid production, agglutinins production, reactive oxygen radical scavenging genes, Indole Acetic Acid biosynthesis, trehalose biosynthesis, plant cell wall degrading enzymes or pathways, root attachment genes, exopolysaccharide secretion, glutamate synthase pathway, iron uptake pathways, siderophore pathway, chitinase pathway, ACC deaminase, glutathione biosynthesis, phosphorous signaling genes, quorum quenching pathway, cytochrome pathways, hemoglobin pathway, bacterial hemoglobin-like pathway, small RNA rsmZ, rhizobitoxine biosynthesis, lapA adhesion protein, AHL quorum sensing pathway, phenazine biosynthesis, cyclic lipopeptide biosynthesis, and antibiotic production.

[0200] CRISPR/Cas9 (Clustered regularly interspaced short palindromic repeats)/CRISPR-associated (Cas) systems can be used to introduce desired mutations. CRISPR/Cas9 provide bacteria and archaea with adaptive immunity against viruses and plasmids by using CRISPR RNAs (crRNAs) to guide the silencing of invading nucleic acids. The Cas9 protein (or functional equivalent and/or variant thereof, i.e., Cas9-like protein) naturally contains DNA endonuclease activity that depends on the association of the protein with two naturally occurring or synthetic RNA molecules called crRNA and tracrRNA (also called guide RNAs). In some cases, the two molecules are covalently link to form a single molecule (also called a single guide RNA (“sgRNA”). Thus, the Cas9 or Cas9-like protein associates with a DNA-targeting RNA (which term encompasses both the two-molecule guide RNA configuration and the single-molecule guide RNA configuration), which activates the Cas9 or Cas9-like protein and guides the protein to a target nucleic acid sequence. If the Cas9 or Cas9-like protein retains its natural enzymatic function, it will cleave target DNA to create a double-stranded break, which can lead to genome alteration (i.e., editing, deletion, insertion (when a donor polynucleotide is present), replacement, etc.), thereby altering gene expression. Some variants of Cas9 (which variants are encompassed by the term Cas9-like) have been altered such that they have a decreased DNA cleaving activity (in some cases, they cleave a single strand instead of both strands of the target DNA, while in other cases, they have severely reduced to no DNA cleavage activity). Further exemplary descriptions of CRISPR systems for introducing genetic variation can be found in, e.g. U.S. Pat. No. 8,795,965.

[0201] As a cyclic amplification technique, polymerase chain reaction (PCR) mutagenesis uses mutagenic primers to introduce desired mutations. PCR is performed by cycles of denaturation, annealing, and extension. After amplification by PCR, selection of mutated DNA and removal of parental plasmid DNA can be accomplished by: 1) replacement of dCTP by hydroxymethylated-dCTP during PCR, followed by digestion with restriction enzymes to remove non-hydroxymethylated parent DNA only; 2) simultaneous mutagenesis of both an antibiotic resistance gene and the studied gene changing the plasmid to a different antibiotic resistance, the new antibiotic resistance facilitating the selection of the desired mutation thereafter; 3) after introducing a desired mutation, digestion of the parent methylated template DNA by restriction enzyme Dpn1 which cleaves only methylated DNA, by which the mutagenized unmethylated chains are recovered; or 4) circularization of the mutated PCR products in an additional ligation reaction to increase the transformation efficiency of mutated DNA. Further description of exemplary methods can be found in e.g. U.S. Pat. Nos. 7,132,265, 6,713,285, 6,673,610, 6,391,548, 5,789,166, 5,780,270, 5,354,670, 5,071,743, and US20100267147.

[0202] Oligonucleotide-directed mutagenesis, also called site-directed mutagenesis, typically utilizes a synthetic DNA primer. This synthetic primer contains the desired mutation and is complementary to the template DNA around the mutation site so that it can hybridize with the DNA in the gene of interest. The mutation may be a single base change (a point mutation), multiple base changes, deletion, or insertion, or a combination of these. The single-strand primer is then extended using a DNA polymerase, which copies the rest of the gene. The gene thus copied contains the mutated site, and may then be introduced into a host cell as a vector and cloned. Finally, mutants can be selected by DNA sequencing to check that they contain the desired mutation.

[0203] Genetic variations can be introduced using error-prone PCR. In this technique, the gene of interest is amplified using a DNA polymerase under conditions that are deficient in the fidelity of replication of sequence. The result is that the amplification products contain at least one error in the sequence. When a gene is amplified and the resulting product(s) of the reaction contain one or more alterations in sequence when compared to the template molecule, the resulting products are mutagenized as compared to the template. Another means of introducing random mutations is exposing cells to a chemical mutagen, such as nitrosoguanidine or ethyl methanesulfonate (Nestmann, Mutat Res 1975 June; 28(3):323-30), and the vector containing the gene is then isolated from the host.

[0204] Saturation mutagenesis is another form of random mutagenesis, in which one tries to generate all or nearly all possible mutations at a specific site, or narrow region of a gene. In a general sense, saturation mutagenesis is comprised of mutagenizing a complete set of mutagenic cassettes (wherein each cassette is, for example, 1-500 bases in length) in defined polynucleotide sequence to be mutagenized (wherein the sequence to be mutagenized is, for example, from 15 to 100,000 bases in length). Therefore, a group of mutations (e.g. ranging from 1 to 100 mutations) is introduced into each cassette to be mutagenized. A grouping of mutations to be introduced into one cassette can be different or the same from a second grouping of mutations to be introduced into a second cassette during the application of one round of saturation mutagenesis. Such groupings are exemplified by deletions, additions, groupings of particular codons, and groupings of particular nucleotide cassettes.

[0205] Fragment shuffling mutagenesis, also called DNA shuffling, is a way to rapidly propagate beneficial mutations. In an example of a shuffling process, DNAse is used to fragment a set of parent genes into pieces of e.g. about 50-100 bp in length. This is then followed by a polymerase chain reaction (PCR) without primers—DNA fragments with sufficient overlapping homologous sequence will anneal to each other and are then be extended by DNA polymerase. Several rounds of this PCR extension are allowed to occur, after some of the DNA molecules reach the size of the parental genes. These genes can then be amplified with another PCR, this time with the addition of primers that are designed to complement the ends of the strands. The primers may have additional sequences added to their 5′ ends, such as sequences for restriction enzyme recognition sites needed for ligation into a cloning vector. Further examples of shuffling techniques are provided in US20050266541.

[0206] Homologous recombination mutagenesis involves recombination between an exogenous DNA fragment and the targeted polynucleotide sequence. After a double-stranded break occurs, sections of DNA around the 5′ ends of the break are cut away in a process called resection. In the strand invasion step that follows, an overhanging 3′ end of the broken DNA molecule then “invades” a similar or identical DNA molecule that is not broken. The method can be used to delete a gene, remove exons, add a gene, and introduce point mutations. Homologous recombination mutagenesis can be permanent or conditional. Typically, a recombination template is also provided. A recombination template may be a component of another vector, contained in a separate vector, or provided as a separate polynucleotide. In some embodiments, a recombination template is designed to serve as a template in homologous recombination, such as within or near a target sequence nicked or cleaved by a site-specific nuclease. A template polynucleotide may be of any suitable length, such as about or more than about 10, 15, 20, 25, 50, 75, 100, 150, 200, 500, 1000, or more nucleotides in length. In some embodiments, the template polynucleotide is complementary to a portion of a polynucleotide comprising the target sequence. When optimally aligned, a template polynucleotide might overlap with one or more nucleotides of a target sequences (e.g. about or more than about 1, 5, 10, 15, 20, 25, 30, 35, 40, 45, 50, 60, 70, 80, 90, 100 or more nucleotides). In some embodiments, when a template sequence and a polynucleotide comprising a target sequence are optimally aligned, the nearest nucleotide of the template polynucleotide is within about 1, 5, 10, 15, 20, 25, 50, 75, 100, 200, 300, 400, 500, 1000, 5000, 10000, or more nucleotides from the target sequence. Non-limiting examples of site-directed nucleases useful in methods of homologous recombination include zinc finger nucleases, CRISPR nucleases, TALE nucleases, and meganuclease. For a further description of the use of such nucleases, see e.g. U.S. Pat. No. 8,795,965 and US20140301990.

[0207] Mutagens that create primarily point mutations and short deletions, insertions, transversions, and/or transitions, including chemical mutagens or radiation, may be used to create genetic variations. Mutagens include, but are not limited to, ethyl methanesulfonate, methylmethane sulfonate, N-ethyl-N-nitrosourea, triethylmelamine, N-methyl-N-nitrosourea, procarbazine, chlorambucil, cyclophosphamide, diethyl sulfate, acrylamide monomer, melphalan, nitrogen mustard, vincristine, dimethylnitrosamine, N-methyl-N′-nitro-Nitrosoguanidine, nitrosoguanidine, 2-aminopurine, 7,12 dimethyl-benz(a)anthracene, ethylene oxide, hexamethylphosphoramide, bisulfan, diepoxyalkanes (diepoxyoctane, diepoxybutane, and the like), 2-methoxy-6-chloro-9[3-(ethyl-2-chloro-ethyl)aminopropylamino]acridine dihydrochloride and formaldehyde.

[0208] Introducing genetic variation may be an incomplete process, such that some bacteria in a treated population of bacteria carry a desired mutation while others do not. In some cases, it is desirable to apply a selection pressure so as to enrich for bacteria carrying a desired genetic variation. Traditionally, selection for successful genetic variants involved selection for or against some functionality imparted or abolished by the genetic variation, such as in the case of inserting antibiotic resistance gene or abolishing a metabolic activity capable of converting a non-lethal compound into a lethal metabolite. It is also possible to apply a selection pressure based on a polynucleotide sequence itself, such that only a desired genetic variation need be introduced (e.g. without also requiring a selectable marker). In this case, the selection pressure can comprise cleaving genomes lacking the genetic variation introduced to a target site, such that selection is effectively directed against the reference sequence into which the genetic variation is sought to be introduced. Typically, cleavage occurs within 100 nucleotides of the target site (e.g. within 75, 50, 25, 10, or fewer nucleotides from the target site, including cleavage at or within the target site). Cleaving may be directed by a site-specific nuclease selected from the group consisting of a Zinc Finger nuclease, a CRISPR nuclease, a TALE nuclease (TALEN), and a meganuclease. Such a process is similar to processes for enhancing homologous recombination at a target site, except that no template for homologous recombination is provided. As a result, bacteria lacking the desired genetic variation are more likely to undergo cleavage that, left unrepaired, results in cell death. Bacteria surviving selection may then be isolated for use in exposing to plants for assessing conferral of an improved trait.

[0209] A CRISPR nuclease may be used as the site-specific nuclease to direct cleavage to a target site. An improved selection of mutated microbes can be obtained by using Cas9 to kill non-mutated cells. Plants are then inoculated with the mutated microbes to re-confirm symbiosis and create evolutionary pressure to select for efficient symbionts. Microbes can then be re-isolated from plant tissues. CRISPR nuclease systems employed for selection against non-variants can employ similar elements to those described above with respect to introducing genetic variation, except that no template for homologous recombination is provided. Cleavage directed to the target site thus enhances death of affected cells.

[0210] Other options for specifically inducing cleavage at a target site are available, such as zinc finger nucleases, TALE nuclease (TALEN) systems, and meganuclease. Zinc-finger nucleases (ZFNs) are artificial DNA endonucleases generated by fusing a zinc finger DNA binding domain to a DNA cleavage domain. ZFNs can be engineered to target desired DNA sequences and this enables zinc-finger nucleases to cleave unique target sequences. When introduced into a cell, ZFNs can be used to edit target DNA in the cell (e.g., the cell's genome) by inducing double stranded breaks. Transcription activator-like effector nucleases (TALENs) are artificial DNA endonucleases generated by fusing a TAL (Transcription activator-like) effector DNA binding domain to a DNA cleavage domain. TALENS can be quickly engineered to bind practically any desired DNA sequence and when introduced into a cell, TALENs can be used to edit target DNA in the cell (e.g., the cell's genome) by inducing double strand breaks. Meganucleases (homing endonuclease) are endodeoxyribonucleases characterized by a large recognition site (double-stranded DNA sequences of 12 to 40 base pairs. Meganucleases can be used to replace, eliminate or modify sequences in a highly targeted way. By modifying their recognition sequence through protein engineering, the targeted sequence can be changed. Meganucleases can be used to modify all genome types, whether bacterial, plant or animal and are commonly grouped into four families: the LAGLIDADG family (SEQ ID NO: 1), the GIY-YIG family, the His-Cyst box family and the HNH family. Exemplary homing endonucleases include I-SceI, I-CeuI, PI-PspI, PI-Sce, I-SceIV, I-CsmI, I-PanI, I-SceII, I-PpoI, I-SceIII, I-CreI, I-TevI, I-TevII and I-TevIII.

### Genetic Variation—Methods of Identification

[0211] The microbes of the present disclosure may be identified by one or more genetic modifications or alterations, which have been introduced into said microbe. One method by which said genetic modification or alteration can be identified is via reference to a SEQ ID NO that contains a portion of the microbe's genomic sequence that is sufficient to identify the genetic modification or alteration.

[0212] Further, in the case of microbes that have not had a genetic modification or alteration (e.g. a wild type, WT) introduced into their genomes, the disclosure can utilize 16S nucleic acid sequences to identify said microbes. A 16S nucleic acid sequence is an example of a “molecular marker” or “genetic marker,” which refers to an indicator that is used in methods for visualizing differences in characteristics of nucleic acid sequences. Examples of other such indicators are restriction fragment length polymorphism (RFLP) markers, amplified fragment length polymorphism (AFLP) markers, single nucleotide polymorphisms (SNPs), insertion mutations, microsatellite markers (SSRs), sequence-characterized amplified regions (SCARs), cleaved amplified polymorphic sequence (CAPS) markers or isozyme markers or combinations of the markers described herein which defines a specific genetic and chromosomal location. Markers further include polynucleotide sequences encoding 16S or 18S rRNA, and internal transcribed spacer (ITS) sequences, which are sequences found between small-subunit and large-subunit rRNA genes that have proven to be especially useful in elucidating relationships or distinctions when compared against one another. Furthermore, the disclosure utilizes unique sequences found in genes of interest (e.g. nifH, D, K, L, A, glnE, amtB, etc.) to identify microbes disclosed herein.

[0213] The primary structure of major rRNA subunit 16S comprise a particular combination of conserved, variable, and hypervariable regions that evolve at different rates and enable the resolution of both very ancient lineages such as domains, and more modern lineages such as genera. The secondary structure of the 16S subunit include approximately 50 helices which result in base pairing of about 67% of the residues. These highly conserved secondary structural features are of great functional importance and can be used to ensure positional homology in multiple sequence alignments and phylogenetic analysis. Over the previous few decades, the 16S rRNA gene has become the most sequenced taxonomic marker and is the cornerstone for the current systematic classification of bacteria and archaea (Yarza et al. 2014. Nature Rev. Micro. 12:635-45).

[0214] Thus, in certain aspects, the disclosure provides for a sequence, which shares at least about 70%, 71%, 72%, 73%, 74%, 75%, 76%, 77%, 78%, 79%, 80%, 81%, 82%, 83%, 84%, 85%, 86%, 87%, 88%, 89%, 90%, 91%, 92%, 93%, 94%, 95%, 96%, 97%, 98%, 99%, or 100% sequence identity to any sequence in Tables 23, 24, 30, 31, and 32.

[0215] Thus, in certain aspects, the disclosure provides for a microbe that comprises a sequence, which shares at least about 70%, 71%, 72%, 73%, 74%, 75%, 76%, 77%, 78%, 79%, 80%, 81%, 82%, 83%, 84%, 85%, 86%, 87%, 88%, 89%, 90%, 91%, 92%, 93%, 94%, 95%, 96%, 97%, 98%, 99%, or 100% sequence identity to SEQ ID NOs: 62-303. These sequences and their associated descriptions can be found in Tables 31 and 32.

[0216] In some aspects, the disclosure provides for a microbe that comprises a 16S nucleic acid sequence, which shares at least about 70%, 71%, 72%, 73%, 74%, 75%, 76%, 77%, 78%, 79%, 80%, 81%, 82%, 83%, 84%, 85%, 86%, 87%, 88%, 89%, 90%, 91%, 92%, 93%, 94%, 95%, 96%, 97%, 98%, 99%, or 100% sequence identity to SEQ ID NOs: 85, 96, 111, 121, 122, 123, 124, 136, 149, 157, 167, 261, 262, 269, 277-283. These sequences and their associated descriptions can be found in Table 32.

[0217] In some aspects, the disclosure provides for a microbe that comprises a nucleic acid sequence, which shares at least about 70%, 71%, 72%, 73%, 74%, 75%, 76%, 77%, 78%, 79%, 80%, 81%, 82%, 83%, 84%, 85%, 86%, 87%, 88%, 89%, 90%, 91%, 92%, 93%, 94%, 95%, 96%, 97%, 98%, 99%, or 100% sequence identity to SEQ ID NOs: 86-95, 97-110, 112-120, 125-135, 137-148, 150-156, 158-166, 168-176, 263-268, 270-274, 275, 276, 284-295. These sequences and their associated descriptions can be found in Table 32.

[0218] In some aspects, the disclosure provides for a microbe that comprises a nucleic acid sequence, which shares at least about 70%, 71%, 72%, 73%, 74%, 75%, 76%, 77%, 78%, 79%, 80%, 81%, 82%, 83%, 84%, 85%, 86%, 87%, 88%, 89%, 90%, 91%, 92%, 93%, 94%, 95%, 96%, 97%, 98%, 99%, or 100% sequence identity to SEQ ID NOs: 177-260, 296-303. These sequences and their associated descriptions can be found in Table 32.

[0219] In some aspects, the disclosure provides for a microbe that comprises, or primer that comprises, or probe that comprises, or non-native junction sequence that comprises, a nucleic acid sequence, which shares at least about 70%, 71%, 72%, 73%, 74%, 75%, 76%, 77%, 78%, 79%, 80%, 81%, 82%, 83%, 84%, 85%, 86%, 87%, 88%, 89%, 90%, 91%, 92%, 93%, 94%, 95%, 96%, 97%, 98%, 99%, or 100% sequence identity to SEQ ID NOs: 304-424. These sequences and their associated descriptions can be found in Table 30.

[0220] In some aspects, the disclosure provides for a microbe that comprises a non-native junction sequence that shares at least about 70%, 71%, 72%, 73%, 74%, 75%, 76%, 77%, 78%, 79%, 80%, 81%, 82%, 83%, 84%, 85%, 86%, 87%, 88%, 89%, 90%, 91%, 92%, 93%, 94%, 95%, 96%, 97%, 98%, 99%, or 100% sequence identity to SEQ ID NOs: 372-405. These sequences and their associated descriptions can be found in Table 30.

[0221] In some aspects, the disclosure provides for a microbe that comprises an amino acid sequence, which shares at least about 70%, 71%, 72%, 73%, 74%, 75%, 76%, 77%, 78%, 79%, 80%, 81%, 82%, 83%, 84%, 85%, 86%, 87%, 88%, 89%, 90%, 91%, 92%, 93%, 94%, 95%, 96%, 97%, 98%, 99%, or 100% sequence identity to SEQ ID NOs: 77, 78, 81, 82, or 83. These sequences and their associated descriptions can be found in Table 31.

### Genetic Variation—Methods of Detection: Primers, Probes, and Assays

[0222] The present disclosure teaches primers, probes, and assays that are useful for detecting the microbes taught herein. In some aspects, the disclosure provides for methods of detecting the WT parental strains. In other aspects, the disclosure provides for methods of detecting the non-intergeneric engineered microbes derived from the WT strains. In aspects, the present disclosure provides methods of identifying non-intergeneric genetic alterations in a microbe.

[0223] In aspects, the genomic engineering methods of the present disclosure lead to the creation of non-natural nucleotide “junction” sequences in the derived non-intergeneric microbes. These non-naturally occurring nucleotide junctions can be used as a type of diagnostic that is indicative of the presence of a particular genetic alteration in a microbe taught herein.

[0224] The present techniques are able to detect these non-naturally occurring nucleotide junctions via the utilization of specialized quantitative PCR methods, including uniquely designed primers and probes. In some aspects, the probes of the disclosure bind to the non-naturally occurring nucleotide junction sequences. In some aspects, traditional PCR is utilized. In other aspects, real-time PCR is utilized. In some aspects, quantitative PCR (qPCR) is utilized.

[0225] Thus, the disclosure can cover the utilization of two common methods for the detection of PCR products in real-time: (1) non-specific fluorescent dyes that intercalate with any double-stranded DNA, and (2) sequence-specific DNA probes consisting of oligonucleotides that are labelled with a fluorescent reporter which permits detection only after hybridization of the probe with its complementary sequence. In some aspects, only the non-naturally occurring nucleotide junction will be amplified via the taught primers, and consequently can be detected via either a non-specific dye, or via the utilization of a specific hybridization probe. In other aspects, the primers of the disclosure are chosen such that the primers flank either side of a junction sequence, such that if an amplification reaction occurs, then said junction sequence is present.

[0226] Aspects of the disclosure involve non-naturally occurring nucleotide junction sequence molecules per se, along with other nucleotide molecules that are capable of binding to said non-naturally occurring nucleotide junction sequences under mild to stringent hybridization conditions. In some aspects, the nucleotide molecules that are capable of binding to said non-naturally occurring nucleotide junction sequences under mild to stringent hybridization conditions are termed “nucleotide probes.”

[0227] In aspects, genomic DNA can be extracted from samples and used to quantify the presence of microbes of the disclosure by using qPCR. The primers utilized in the qPCR reaction can be primers designed by Primer Blast (www.ncbi.nlm.nih.gov/tools/primer-blast/) to amplify unique regions of the wild-type genome or unique regions of the engineered non-intergeneric mutant strains. The qPCR reaction can be carried out using the SYBR GreenER qPCR SuperMix Universal (Thermo Fisher P/N 11762100) kit, using only forward and reverse amplification primers; alternatively, the Kapa Probe Force kit (Kapa Biosystems P/N KK4301) can be used with amplification primers and a TaqMan probe containing a FAM dye label at the 5′ end, an internal ZEN quencher, and a minor groove binder and fluorescent quencher at the 3′ end (Integrated DNA Technologies).

[0228] Certain primer, probe, and non-native junction sequences are listed in Table 30. qPCR reaction efficiency can be measured using a standard curve generated from a known quantity of gDNA from the target genome. Data can be normalized to genome copies per g fresh weight using the tissue weight and extraction volume.

[0229] Quantitative polymerase chain reaction (qPCR) is a method of quantifying, in real time, the amplification of one or more nucleic acid sequences. The real time quantification of the PCR assay permits determination of the quantity of nucleic acids being generated by the PCR amplification steps by comparing the amplifying nucleic acids of interest and an appropriate control nucleic acid sequence, which may act as a calibration standard.

[0230] TaqMan probes are often utilized in qPCR assays that require an increased specificity for quantifying target nucleic acid sequences. TaqMan probes comprise an oligonucleotide probe with a fluorophore attached to the 5′ end and a quencher attached to the 3′ end of the probe. When the TaqMan probes remain as is with the 5′ and 3′ ends of the probe in close contact with each other, the quencher prevents fluorescent signal transmission from the fluorophore. TaqMan probes are designed to anneal within a nucleic acid region amplified by a specific set of primers. As the Taq polymerase extends the primer and synthesizes the nascent strand, the 5′ to 3′ exonuclease activity of the Taq polymerase degrades the probe that annealed to the template. This probe degradation releases the fluorophore, thus breaking the close proximity to the quencher and allowing fluorescence of the fluorophore. Fluorescence detected in the qPCR assay is directly proportional to the fluorophore released and the amount of DNA template present in the reaction.

[0231] The features of qPCR allow the practitioner to eliminate the labor-intensive post-amplification step of gel electrophoresis preparation, which is generally required for observation of the amplified products of traditional PCR assays. The benefits of qPCR over conventional PCR are considerable, and include increased speed, ease of use, reproducibility, and quantitative ability.

### Improvement of Traits

[0232] Methods of the present disclosure may be employed to introduce or improve one or more of a variety of desirable traits. Examples of traits that may introduced or improved include: root biomass, root length, height, shoot length, leaf number, water use efficiency, overall biomass, yield, fruit size, grain size, photosynthesis rate, tolerance to drought, heat tolerance, salt tolerance, resistance to nematode stress, resistance to a fungal pathogen, resistance to a bacterial pathogen, resistance to a viral pathogen, level of a metabolite, and proteome expression. The desirable traits, including height, overall biomass, root and/or shoot biomass, seed germination, seedling survival, photosynthetic efficiency, transpiration rate, seed/fruit number or mass, plant grain or fruit yield, leaf chlorophyll content, photosynthetic rate, root length, or any combination thereof, can be used to measure growth, and compared with the growth rate of reference agricultural plants (e.g., plants without the improved traits) grown under identical conditions.

[0233] A preferred trait to be introduced or improved is nitrogen fixation, as described herein. In some cases, a plant resulting from the methods described herein exhibits a difference in the trait that is at least about 5% greater, for example at least about 5%, at least about 8%, at least about 10%, at least about 15%, at least about 20%, at least about 25%, at least about 30%, at least about 40%, at least about 50%, at least about 60%, at least about 75%, at least about 80%, at least about 80%, at least about 90%, or at least 100%, at least about 200%, at least about 300%, at least about 400% or greater than a reference agricultural plant grown under the same conditions in the soil. In additional examples, a plant resulting from the methods described herein exhibits a difference in the trait that is at least about 5% greater, for example at least about 5%, at least about 8%, at least about 10%, at least about 15%, at least about 20%, at least about 25%, at least about 30%, at least about 40%, at least about 50%, at least about 60%, at least about 75%, at least about 80%, at least about 80%, at least about 90%, or at least 100%, at least about 200%, at least about 300%, at least about 400% or greater than a reference agricultural plant grown under similar conditions in the soil.

[0234] The trait to be improved may be assessed under conditions including the application of one or more biotic or abiotic stressors. Examples of stressors include abiotic stresses (such as heat stress, salt stress, drought stress, cold stress, and low nutrient stress) and biotic stresses (such as nematode stress, insect herbivory stress, fungal pathogen stress, bacterial pathogen stress, and viral pathogen stress).

[0235] The trait improved by methods and compositions of the present disclosure may be nitrogen fixation, including in a plant not previously capable of nitrogen fixation. In some cases, bacteria isolated according to a method described herein produce 1% or more (e.g. 2%, 3%, 4%, 5%, 6%, 7%, 8%, 9%, 10%, 15%, 20%, or more) of a plant's nitrogen, which may represent an increase in nitrogen fixation capability of at least 2-fold (e.g. 3-fold, 4-fold, 5-fold, 6-fold, 7-fold, 8-fold, 9-fold, 10-fold, 20-fold, 50-fold, 100-fold, 1000-fold, or more) as compared to bacteria isolated from the first plant before introducing any genetic variation. In some cases, the bacteria produce 5% or more of a plant's nitrogen. The desired level of nitrogen fixation may be achieved after repeating the steps of introducing genetic variation, exposure to a plurality of plants, and isolating bacteria from plants with an improved trait one or more times (e.g. 1, 2, 3, 4, 5, 10, 15, 25, or more times). In some cases, enhanced levels of nitrogen fixation are achieved in the presence of fertilizer supplemented with glutamine, ammonia, or other chemical source of nitrogen. Methods for assessing degree of nitrogen fixation are known, examples of which are described herein.

[0236] Microbe breeding is a method to systematically identify and improve the role of species within the crop microbiome. The method comprises three steps: 1) selection of candidate species by mapping plant-microbe interactions and predicting regulatory networks linked to a particular phenotype, 2) pragmatic and predictable improvement of microbial phenotypes through intra-species crossing of regulatory networks and gene clusters, and 3) screening and selection of new microbial genotypes that produce desired crop phenotypes. To systematically assess the improvement of strains, a model is created that links colonization dynamics of the microbial community to genetic activity by key species. The model is used to predict genetic targets for breeding and improve the frequency of selecting improvements in microbiome-encoded traits of agronomic relevance.

### Measuring Nitrogen Delivered in an Agriculturally Relevant Field Context

[0237] In the field, the amount of nitrogen delivered can be determined by the function of colonization multiplied by the activity.

$$Nitrogen delivered = {\int }_{Time \& Space} Colonization \times Activity$$

[0238] The above equation requires (1) the average colonization per unit of plant tissue, and (2) the activity as either the amount of nitrogen fixed or the amount of ammonia excreted by each microbial cell. To convert to pounds of nitrogen per acre, corn growth physiology is tracked over time, e.g., size of the plant and associated root system throughout the maturity stages.

[0239] The pounds of nitrogen delivered to a crop per acre-season can be calculated by the following equation:

Nitrogen delivered=∫Plant Tissue(t)×Colonization(t)×Activity(t)dt

[0240] The Plant Tissue(t) is the fresh weight of corn plant tissue over the growing time (t). Values for reasonably making the calculation are described in detail in the publication entitled Roots, Growth and Nutrient Uptake (Mengel. Dept. of Agronomy Pub. #AGRY-95-08 (Rev. May-95. p. 1-8).

[0241] The Colonization (t) is the amount of the microbes of interest found within the plant tissue, per gram fresh weight of plant tissue, at any particular time, t, during the growing season. In the instance of only a single timepoint available, the single timepoint is normalized as the peak colonization rate over the season, and the colonization rate of the remaining timepoints are adjusted accordingly.

[0242] Activity(t) is the rate of which N is fixed by the microbes of interest per unit time, at any particular time, t, during the growing season. In the embodiments disclosed herein, this activity rate is approximated by in vitro acetylene reduction assay (ARA) in ARA media in the presence of 5 mM glutamine or Ammonium excretion assay in ARA media in the presence of 5 mM ammonium ions.

[0243] The Nitrogen delivered amount is then calculated by numerically integrating the above function. In cases where the values of the variables described above are discretely measured at set timepoints, the values in between those timepoints are approximated by performing linear interpolation.

### Nitrogen Fixation

[0244] Described herein are methods of increasing nitrogen fixation in a plant, comprising exposing the plant to bacteria comprising one or more genetic variations introduced into one or more genes regulating nitrogen fixation, wherein the bacteria produce 1% or more of nitrogen in the plant (e.g. 2%, 5%, 10%, or more), which may represent a nitrogen-fixation capability of at least 2-fold as compared to the plant in the absence of the bacteria. The bacteria may produce the nitrogen in the presence of fertilizer supplemented with glutamine, urea, nitrates or ammonia. Genetic variations can be any genetic variation described herein, including examples provided above, in any number and any combination. The genetic variation may be introduced into a gene selected from the group consisting of nifA, nifL, ntrB, ntrC, glutamine synthetase, glnA, glnB, glnK, draT, amtB, glutaminase, glnD, glnE, nifJ, nifH, nifD, nifK, nifY, nifE, nifN, nifU, nifS, nifV, nifW, nifZ, nifM, nifF, nifB, and nifQ. The genetic variation may be a mutation that results in one or more of: increased expression or activity of nifA or glutaminase; decreased expression or activity of nifL, ntrB, glutamine synthetase, glnB, glnK, draT, amtB; decreased adenylyl-removing activity of GlnE; or decreased uridylyl-removing activity of GlnD. The genetic variation introduced into one or more bacteria of the methods disclosed herein may be a knock-out mutation or it may abolish a regulatory sequence of a target gene, or it may comprise insertion of a heterologous regulatory sequence, for example, insertion of a regulatory sequence found within the genome of the same bacterial species or genus. The regulatory sequence can be chosen based on the expression level of a gene in a bacterial culture or within plant tissue. The genetic variation may be produced by chemical mutagenesis. The plants grown in step (c) may be exposed to biotic or abiotic stressors.

[0245] The amount of nitrogen fixation that occurs in the plants described herein may be measured in several ways, for example by an acetylene-reduction (AR) assay. An acetylene-reduction assay can be performed in vitro or in vivo. Evidence that a particular bacterium is providing fixed nitrogen to a plant can include: 1) total plant N significantly increases upon inoculation, preferably with a concomitant increase in N concentration in the plant; 2) nitrogen deficiency symptoms are relieved under N-limiting conditions upon inoculation (which should include an increase in dry matter); 3) N₂ fixation is documented through the use of an ¹⁵N approach (which can be isotope dilution experiments, ¹⁵N₂ reduction assays, or ¹⁵N natural abundance assays); 4) fixed N is incorporated into a plant protein or metabolite; and 5) all of these effects are not be seen in non-inoculated plants or in plants inoculated with a mutant of the inoculum strain.

[0246] The wild-type nitrogen fixation regulatory cascade can be represented as a digital logic circuit where the inputs O₂ and NH₄⁺ pass through a NOR gate, the output of which enters an AND gate in addition to ATP. In some embodiments, the methods disclosed herein disrupt the influence of NH₄⁺ on this circuit, at multiple points in the regulatory cascade, so that microbes can produce nitrogen even in fertilized fields. However, the methods disclosed herein also envision altering the impact of ATP or O₂ on the circuitry, or replacing the circuitry with other regulatory cascades in the cell, or altering genetic circuits other than nitrogen fixation. Gene clusters can be re-engineered to generate functional products under the control of a heterologous regulatory system. By eliminating native regulatory elements outside of, and within, coding sequences of gene clusters, and replacing them with alternative regulatory systems, the functional products of complex genetic operons and other gene clusters can be controlled and/or moved to heterologous cells, including cells of different species other than the species from which the native genes were derived. Once re-engineered, the synthetic gene clusters can be controlled by genetic circuits or other inducible regulatory systems, thereby controlling the products' expression as desired. The expression cassettes can be designed to act as logic gates, pulse generators, oscillators, switches, or memory devices. The controlling expression cassette can be linked to a promoter such that the expression cassette functions as an environmental sensor, such as an oxygen, temperature, touch, osmotic stress, membrane stress, or redox sensor.

[0247] As an example, the nifL, nifA, nifT, and nifX genes can be eliminated from the nif gene cluster. Synthetic genes can be designed by codon randomizing the DNA encoding each amino acid sequence. Codon selection is performed, specifying that codon usage be as divergent as possible from the codon usage in the native gene. Proposed sequences are scanned for any undesired features, such as restriction enzyme recognition sites, transposon recognition sites, repetitive sequences, sigma 54 and sigma 70 promoters, cryptic ribosome binding sites, and rho independent terminators. Synthetic ribosome binding sites are chosen to match the strength of each corresponding native ribosome binding site, such as by constructing a fluorescent reporter plasmid in which the 150 bp surrounding a gene's start codon (from −60 to +90) is fused to a fluorescent gene. This chimera can be expressed under control of the Ptac promoter, and fluorescence measured via flow cytometry. To generate synthetic ribosome binding sites, a library of reporter plasmids using 150 bp (−60 to +90) of a synthetic expression cassette is generated. Briefly, a synthetic expression cassette can consist of a random DNA spacer, a degenerate sequence encoding an RBS library, and the coding sequence for each synthetic gene. Multiple clones are screened to identify the synthetic ribosome binding site that best matched the native ribosome binding site. Synthetic operons that consist of the same genes as the native operons are thus constructed and tested for functional complementation. A further exemplary description of synthetic operons is provided in US20140329326.

### Bacterial Species

[0248] Microbes useful in the methods and compositions disclosed herein may be obtained from any source. In some cases, microbes may be bacteria, archaea, protozoa or fungi. The microbes of this disclosure may be nitrogen fixing microbes, for example a nitrogen fixing bacteria, nitrogen fixing archaea, nitrogen fixing fungi, nitrogen fixing yeast, or nitrogen fixing protozoa. Microbes useful in the methods and compositions disclosed herein may be spore-forming microbes, for example spore forming bacteria. In some cases, bacteria useful in the methods and compositions disclosed herein may be Gram positive bacteria or Gram negative bacteria. In some cases, the bacteria may be an endospore forming bacteria of the Firmicute phylum. In some cases, the bacteria may be a diazotroph. In some cases, the bacteria may not be a diazotroph.

[0249] The methods and compositions of this disclosure may be used with an archaea, such as, for example, Methanothermobacter thermoautotrophicus.

[0250] In some cases, bacteria which may be useful include, but are not limited to, Agrobacterium radiobacter, Bacillus acidocaldarius, Bacillus acidoterrestris, Bacillus agri, Bacillus aizawai, Bacillus albolactis, Bacillus alcalophilus, Bacillus alvei, Bacillus aminoglucosidicus, Bacillus aminovorans, Bacillus amylolyticus (also known as Paenibacillus amylolyticus) Bacillus amyloliquefaciens, Bacillus aneurinolyticus, Bacillus atrophaeus, Bacillus azotoformans, Bacillus badius, Bacillus cereus (synonyms: Bacillus endorhythmos, Bacillus medusa), Bacillus chitinosporus, Bacillus circulars, Bacillus coagulans, Bacillus endoparasiticus Bacillus fastidiosus, Bacillus firmus, Bacillus kurstaki, Bacillus lacticola, Bacillus lactimorbus, Bacillus lactis, Bacillus laterosporus (also known as Brevibacillus laterosporus), Bacillus lautus, Bacillus lentimorbus, Bacillus lentus, Bacillus licheniformis, Bacillus maroccanus, Bacillus megaterium, Bacillus metiens, Bacillus mycoides, Bacillus natto, Bacillus nematocida, Bacillus nigrificans, Bacillus nigrum, Bacillus pantothenticus, Bacillus popillae, Bacillus psychrosaccharolyticus, Bacillus pumilus, Bacillus siamensis, Bacillus smithii, Bacillus sphaericus, Bacillus subtilis, Bacillus thuringiensis, Bacillus uniflagellatus, Bradyrhizobium japonicum, Brevibacillus brevis Brevibacillus laterosporus (formerly Bacillus laterosporus), Chromobacterium subtsugae, Delftia acidovorans, Lactobacillus acidophilus, Lysobacter antibioticus, Lysobacter enzymogenes, Paenibacillus alvei, Paenibacillus polymyxa, Paenibacillus popilliae (formerly Bacillus popilliae), Pantoea agglomerans, Pasteuria penetrans (formerly Bacillus penetrans), Pasteuria usgae, Pectobacterium carotovorum (formerly Erwinia carotovora), Pseudomonas aeruginosa, Pseudomonas aureofaciens, Pseudomonas cepacia (formerly known as Burkholderia cepacia), Pseudomonas chlororaphis, Pseudomonas fluorescens, Pseudomonas proradix, Pseudomonas putida, Pseudomonas syringae, Serratia entomophila, Serratia marcescens, Streptomyces colombiensis, Streptomyces galbus, Streptomyces goshikiensis, Streptomyces griseoviridis, Streptomyces lavendulae, Streptomyces prasinus, Streptomyces saraceticus, Streptomyces venezuelae, Xanthomonas campestris, Xenorhabdus luminescens, Xenorhabdus nematophila, Rhodococcus globerulus AQ719 (NRRL Accession No. B-21663), Bacillus sp. AQ175 (ATCC Accession No. 55608), Bacillus sp. AQ 177 (ATCC Accession No. 55609), Bacillus sp. AQ178 (ATCC Accession No. 53522), and Streptomyces sp. strain NRRL Accession No. B-30145. In some cases the bacterium may be Azotobacter chroococcum, Methanosarcina barkeri, Klebsiella pneumoniae, Azotobacter vinelandii, Rhodobacter spharoides, Rhodobacter capsulatus, Rhodobacter palustris, Rhodosporillum rubrum, Rhizobium leguminosarum or Rhizobium etli.

[0251] In some cases, the bacterium may be a species of Clostridium, for example Clostridium pasteurianum, Clostridium beijerinckii, Clostridium perfringens, Clostridium tetani, Clostridium acetobutylicum.

[0252] In some cases, bacteria used with the methods and compositions of the present disclosure may be cyanobacteria. Examples of cyanobacterial genuses include Anabaena (for example Anagaena sp. PCC7120), Nostoc (for example Nostoc punctiforme), or Synechocystis (for example Synechocystis sp. PCC6803).

[0253] In some cases, bacteria used with the methods and compositions of the present disclosure may belong to the phylum Chlorobi, for example Chlorobium tepidum.

[0254] In some cases, microbes used with the methods and compositions of the present disclosure may comprise a gene homologous to a known NifH gene. Sequences of known NifH genes may be found in, for example, the Zehr lab NifH database, (wwwzehr.pmc.ucsc.edu/nifH_Database_Public/, Apr. 4, 2014), or the Buckley lab NifH database (www.css.cornell.edu/faculty/buckley/nifh, and Gaby, John Christian, and Daniel H. Buckley. “A comprehensive aligned nifH gene database: a multipurpose tool for studies of nitrogen-fixing bacteria.” Database 2014 (2014): bau001). In some cases, microbes used with the methods and compositions of the present disclosure may comprise a sequence which encodes a polypeptide with at least 60%, 70%, 80%, 85%, 90%, 95%, 96%, 96%, 98%, 99% or more than 99% sequence identity to a sequence from the Zehr lab NifH database, (wwwzehr.pmc.ucsc.edu/nifH_Database_Public/, Apr. 4, 2014). In some cases, microbes used with the methods and compositions of the present disclosure may comprise a sequence which encodes a polypeptide with at least 60%, 70%, 80%, 85%, 90%, 95%, 96%, 96%, 98%, 99% or more than 99% sequence identity to a sequence from the Buckley lab NifH database, (Gaby, John Christian, and Daniel H. Buckley. “A comprehensive aligned nifH gene database; a multipurpose tool for studies of nitrogen-fixing bacteria.” Database 2014 (2014): bau00I).

[0255] Microbes useful in the methods and compositions disclosed herein can be obtained by extracting microbes from surfaces or tissues of native plants; grinding seeds to isolate microbes; planting seeds in diverse soil samples and recovering microbes from tissues; or inoculating plants with exogenous microbes and determining which microbes appear in plant tissues. Non-limiting examples of plant tissues include a seed, seedling, leaf, cutting, plant, bulb, tuber, root, and rhizomes. In some cases, bacteria are isolated from a seed. The parameters for processing samples may be varied to isolate different types of associative microbes, such as rhizospheric, epiphytes, or endophytes. Bacteria may also be sourced from a repository, such as environmental strain collections, instead of initially isolating from a first plant. The microbes can be genotyped and phenotyped, via sequencing the genomes of isolated microbes; profiling the composition of communities in planta; characterizing the transcriptomic functionality of communities or isolated microbes; or screening microbial features using selective or phenotypic media (e.g., nitrogen fixation or phosphate solubilization phenotypes). Selected candidate strains or populations can be obtained via sequence data; phenotype data; plant data (e.g., genome, phenotype, and/or yield data); soil data (e.g., pH, N/P/K content, and/or bulk soil biotic communities); or any combination of these.

[0256] The bacteria and methods of producing bacteria described herein may apply to bacteria able to self-propagate efficiently on the leaf surface, root surface, or inside plant tissues without inducing a damaging plant defense reaction, or bacteria that are resistant to plant defense responses. The bacteria described herein may be isolated by culturing a plant tissue extract or leaf surface wash in a medium with no added nitrogen. However, the bacteria may be unculturable, that is, not known to be culturable or difficult to culture using standard methods known in the art. The bacteria described herein may be an endophyte or an epiphyte or a bacterium inhabiting the plant rhizosphere (rhizospheric bacteria). The bacteria obtained after repeating the steps of introducing genetic variation, exposure to a plurality of plants, and isolating bacteria from plants with an improved trait one or more times (e.g. 1, 2, 3, 4, 5, 10, 15, 25, or more times) may be endophytic, epiphytic, or rhizospheric. Endophytes are organisms that enter the interior of plants without causing disease symptoms or eliciting the formation of symbiotic structures, and are of agronomic interest because they can enhance plant growth and improve the nutrition of plants (e.g., through nitrogen fixation). The bacteria can be a seed-borne endophyte. Seed-borne endophytes include bacteria associated with or derived from the seed of a grass or plant, such as a seed-borne bacterial endophyte found in mature, dry, undamaged (e.g., no cracks, visible fungal infection, or prematurely germinated) seeds. The seed-borne bacterial endophyte can be associated with or derived from the surface of the seed; alternatively, or in addition, it can be associated with or derived from the interior seed compartment (e.g., of a surface-sterilized seed). In some cases, a seed-borne bacterial endophyte is capable of replicating within the plant tissue, for example, the interior of the seed. Also, in some cases, the seed-borne bacterial endophyte is capable of surviving desiccation.

[0257] The bacterial isolated according to methods of the disclosure, or used in methods or compositions of the disclosure, can comprise a plurality of different bacterial taxa in combination. By way of example, the bacteria may include Proteobacteria (such as Pseudomonas, Enterobacter, Stenotrophomonas, Burkholderia, Rhizobium, Herbaspirillum, Pantoea, Serratia, Rahnella, Azospirillum, Azorhizobium, Azotobacter, Duganella, Delftia, Bradyrhizobiun, Sinorhizobium and Halomonas), Firmicutes (such as Bacillus, Paenibacillus, Lactobacillus, Mycoplasma, and Acetabacterium), and Actinobacteria (such as Streptomyces, Rhodacoccus, Microbacterium, and Curtobacterium). The bacteria used in methods and compositions of this disclosure may include nitrogen fixing bacterial consortia of two or more species. In some cases, one or more bacterial species of the bacterial consortia may be capable of fixing nitrogen. In some cases, one or more species of the bacterial consortia may facilitate or enhance the ability of other bacteria to fix nitrogen. The bacteria which fix nitrogen and the bacteria which enhance the ability of other bacteria to fix nitrogen may be the same or different. In some examples, a bacterial strain may be able to fix nitrogen when in combination with a different bacterial strain, or in a certain bacterial consortia, but may be unable to fix nitrogen in a monoculture. Examples of bacterial genuses which may be found in a nitrogen fixing bacterial consortia include, but are not limited to, Herbaspirillum, Azospirillum, Enterobacter, and Bacillus.

[0258] Bacteria that can be produced by the methods disclosed herein include Azotobacter sp., Bradyrhizobium sp., Klebsiella sp., and Sinorhizobium sp. In some cases, the bacteria may be selected from the group consisting of: Azotobacter vinelandii, Bradyrhizobium japonicum, Klebsiella pneumoniae, and Sinorhizobium meliloti. In some cases, the bacteria may be of the genus Enterobacter or Rahnella. In some cases, the bacteria may be of the genus Frankia, or Clostridium. Examples of bacteria of the genus Clostridium include, but are not limited to, Clostridium acetobutilicum, Clostridium pasteurianum, Clostridium beijerinckii, Clostridium perfringens, and Clostridium tetani. In some cases, the bacteria may be of the genus Paenibacillus, for example Paenibacillus azotofixans, Paenibacillus borealis, Paenibacillus durus, Paenibacillus macerans, Paenibacillus polymyxa, Paenibacillus alvei, Paenibacillus amylolyticus, Paenibacillus campinasensis, Paenibacillus chibensis, Paenibacillus glucanolyticus, Paenibacillus illinoisensis, Paenibacillus larvae subsp. Larvae, Paenibacillus larvae subsp. Pulvifaciens, Paenibacillus lautus, Paenibacillus macerans, Paenibacillus macquariensis, Paenibacillus macquariensis, Paenibacillus pabuli, Paenibacillus peoriae, or Paenibacillus polymyxa.

[0259] In some examples, bacteria isolated according to methods of the disclosure can be a member of one or more of the following taxa: Achromobacter, Acidithiobacillus, Acidovorax, Acidovoraz, Acinetobacter, Actinoplanes, Adlercreutzia, Aerococcus, Aeromonas, Afipia, Agromyces, Ancylobacter, Arthrobacter, Atopostipes, Azospirillum, Bacillus, Bdellovibrio, Beijerinckia, Bosea, Bradyrhizobium, Brevibacillus, Brevundimonas, Burkholderia, Candidatus Haloredivivus, Caulobacter, Cellulomonas, Cellvibrio, Chryseobacterium, Citrobacter, Clostridium, Coraliomargarita, Corynebacterium, Cupriavidus, Curtobacterium, Curvibacter, Deinococcus, Delftia, Desemzia, Devosia, Dokdonella, Dyella, Enhydrobacter, Enterobacter, Enterococcus, Erwinia, Escherichia, Escherichia/Shigella, Exiguobacterium, Ferroglobus, Filimonas, Finegoldia, Flavisolibacter, Flavobacterium, Frigoribacterium, Gluconacetobacter, Hafnia, Halobaculum, Halomonas, Halosimplex, Herbaspirillum, Hymenobacter, Klebsiella, Kocuria, Kosakonia, Lactobacillus, Leclercia, Lentzea, Luteibacter, Luteimonas, Massilia, Mesorhizobium, Methylobacterium, Microbacterium, Micrococcus, Microvirga, Mycobacterium, Neisseria, Nocardia, Oceanibaculum, Ochrobactrum, Okibacterium, Oligotropha, Oryzihumus, Oxalophagus, Paenibacillus, Panteoa, Pantoea, Pelomonas, Perlucidibaca, Plantibacter, Polynucleobacter, Propionibacterium, Propioniciclava, Pseudoclavibacter, Pseudomonas, Pseudonocardia, Pseudoxanthomonas, Psychrobacter, Rahnella, Ralstonia, Rheinheimera, Rhizobium, Rhodococcus, Rhodopseudomonas, Roseateles, Ruminococcus, Sebaldella, Sediminibacillus, Sediminibacterium, Serratia, Shigella, Shigella, Sinorhizobium, Sinosporangium, Sphingobacterium, Sphingomonas, Sphingopyxis, Sphingosinicella, Staphylococcus, 25 Stenotrophomonas, Strenotrophomonas, Streptococcus, Streptomyces, Stygiolobus, Sulfurisphaera, Tatumella, Tepidimonas, Thermomonas, Thiobacillus, Variovorax, WPS-2 genera incertae sedis, Xanthomonas, and Zimmermannella.

[0260] In some cases, a bacterial species selected from at least one of the following genera are utilized: Enterobacter, Klebsiella, Kosakonia, and Rahnella. In some cases, a combination of bacterial species from the following genera are utilized: Enterobacter, Klebsiella, Kosakonia, and Rahnella. In some cases, the species utilized can be one or more of: Enterobacter sacchari, Klebsiella variicola, Kosakonia sacchari, and Rahnella aquatilis.

[0261] In some cases, a Gram positive microbe may have a Molybdenum-Iron nitrogenase system comprising: nifH, nifD, nifK, nifB, nifE, nifN, nifX, hesA, nifV, nifW, nifU, nifS, and MN. In some cases, a Gram positive microbe may have a vanadium nitrogenase system comprising: vnfDG, vnfK, vnfE, vnfN, vupC, vupB, vupA, vnfV, vnfR1, vnfH, vnfR2, vnfA (transcriptional regulator). In some cases, a Gram positive microbe may have an iron-only nitrogenase system comprising: anfK, anfG, anfD, anfH, anfA (transcriptional regulator). In some cases a Gram positive microbe may have a nitrogenase system comprising glnB, and glnK (nitrogen signaling proteins). Some examples of enzymes involved in nitrogen metabolism in Gram positive microbes include glnA (glutamine synthetase), gdh (glutamate dehydrogenase), bdh (3-hydroxybutyrate dehydrogenase), glutaminase, gltAB/gltB/gltS (glutamate synthase), asnA/asnB (aspartate-ammonia ligase/asparagine synthetase), and ansA/ansZ (asparaginase). Some examples of proteins involved in nitrogen transport in Gram positive microbes include amtB (ammonium transporter), glnK (regulator of ammonium transport), glnPHQ/glnQHMP (ATP-dependent glutamine/glutamate transporters), glnT/alsT/yrbD/yflA (glutamine-like proton symport transporters), and gltP/gltT/yhcl/nqt (glutamate-like proton symport transporters).

[0262] Examples of Gram positive microbes which may be of particular interest include Paenibacillus polymixa, Paenibacillus riograndensis, Paenibacillus sp., Frankia sp., Heliobacterium sp., Heliobacterium chlorum, Heliobacillus sp., Heliophilum sp., Heliorestis sp., Clostridium acetobutylicum, Clostridium sp., Mycobacterium flaum, Mycobacterium sp., Arthrobacter sp., Agromyces sp., Corynebacterium autitrophicum, Corynebacterium sp., Micromonspora sp., Propionibacteria sp., Streptomyces sp., and Microbacterium sp.

[0263] Some examples of genetic alterations which may be made in Gram positive microbes include: deleting glnR to remove negative regulation of BNF in the presence of environmental nitrogen, inserting different promoters directly upstream of the nif cluster to eliminate regulation by GlnR in response to environmental nitrogen, mutating glnA to reduce the rate of ammonium assimilation by the GS-GOGAT pathway, deleting amtB to reduce uptake of ammonium from the media, mutating glnA so it is constitutively in the feedback-inhibited (FBI-GS) state, to reduce ammonium assimilation by the GS-GOGAT pathway.

[0264] In some cases, glnR is the main regulator of N metabolism and fixation in Paenibacillus species. In some cases, the genome of a Paenibacillus species may not contain a gene to produce glnR. In some cases, the genome of a Paenibacillus species may not contain a gene to produce glnE or glnD. In some cases, the genome of a Paenibacillus species may contain a gene to produce glnB or glnK. For example, Paenibacillus sp. WLY78 doesn't contain a gene for glnB, or its homologs found in the archaeon Methanococcus maripaludis, nifI1 and nifI2. In some cases, the genomes of Paenibacillus species may be variable. For example, Paenibacillus polymixa E681 lacks glnK and gdh, has several nitrogen compound transporters, but only amtB appears to be controlled by GlnR. In another example, Paenibacillus sp. JDR2 has glnK, gdh and most other central nitrogen metabolism genes, has many fewer nitrogen compound transporters, but does have glnPHQ controlled by GlnR. Paenibacillus riograndensis SBR5 contains a standard glnRA operon, an fdx gene, a main nif operon, a secondary nif operon, and an anf operon (encoding iron-only nitrogenase). Putative glnR/tnrA sites were found upstream of each of these operons. GlnR may regulate all of the above operons, except the anf operon. GlnR may bind to each of these regulatory sequences as a dimer.

[0265] Paenibacillus N-fixing strains may fall into two subgroups: Subgroup I, which contains only a minimal nif gene cluster and subgroup II, which contains a minimal cluster, plus an uncharacterized gene between nifX and hesA, and often other clusters duplicating some of the nif genes, such as nifH, nifHDK, nifBEN, or clusters encoding vanadium nitrogenase (vnf) or iron-only nitrogenase (anf) genes.

[0266] In some cases, the genome of a Paenibacillus species may not contain a gene to produce glnB or glnK. In some cases, the genome of a Paenibacillus species may contain a minimal nif cluster with 9 genes transcribed from a sigma-70 promoter. In some cases, a Paenibacillus nif cluster may be negatively regulated by nitrogen or oxygen. In some cases, the genome of a Paenibacillus species may not contain a gene to produce sigma-54. For example, Paenibacillus sp. WLY78 does not contain a gene for sigma-54. In some cases, a nif cluster may be regulated by glnR, and/or TnrA. In some cases, activity of a nif cluster may be altered by altering activity of glnR, and/or TnrA.

[0267] In Bacilli, glutamine synthetase (GS) is feedback-inhibited by high concentrations of intracellular glutamine, causing a shift in confirmation (referred to as FBI-GS). Nif clusters contain distinct binding sites for the regulators GlnR and TnrA in several Bacilli species. GlnR binds and represses gene expression in the presence of excess intracellular glutamine and AMP. A role of GlnR may be to prevent the influx and intracellular production of glutamine and ammonium under conditions of high nitrogen availability. TnrA may bind and/or activate (or repress) gene expression in the presence of limiting intracellular glutamine, and/or in the presence of FBI-GS. In some cases, the activity of a Bacilli nif cluster may be altered by altering the activity of GlnR.

[0268] Feedback-inhibited glutamine synthetase (FBI-GS) may bind GlnR and stabilize binding of GlnR to recognition sequences. Several bacterial species have a GlnR/TnrA binding site upstream of the nif cluster. Altering the binding of FBI-GS and GlnR may alter the activity of the nif pathway.

### Sources of Microbes

[0269] The bacteria (or any microbe according to the disclosure) may be obtained from any general terrestrial environment, including its soils, plants, fungi, animals (including invertebrates) and other biota, including the sediments, water and biota of lakes and rivers; from the marine environment, its biota and sediments (for example, sea water, marine muds, marine plants, marine invertebrates (for example, sponges), marine vertebrates (for example, fish)); the terrestrial and marine geosphere (regolith and rock, for example, crushed subterranean rocks, sand and clays); the cryosphere and its meltwater; the atmosphere (for example, filtered aerial dusts, cloud and rain droplets); urban, industrial and other man-made environments (for example, accumulated organic and mineral matter on concrete, roadside gutters, roof surfaces, and road surfaces).

[0270] The plants from which the bacteria (or any microbe according to the disclosure) are obtained may be a plant having one or more desirable traits, for example a plant that naturally grows in a particular environment or under certain conditions of interest. By way of example, a certain plant may naturally grow in sandy soil or sand of high salinity, or under extreme temperatures, or with little water, or it may be resistant to certain pests or disease present in the environment, and it may be desirable for a commercial crop to be grown in such conditions, particularly if they are, for example, the only conditions available in a particular geographic location. By way of further example, the bacteria may be collected from commercial crops grown in such environments, or more specifically from individual crop plants best displaying a trait of interest amongst a crop grown in any specific environment: for example the fastest-growing plants amongst a crop grown in saline-limiting soils, or the least damaged plants in crops exposed to severe insect damage or disease epidemic, or plants having desired quantities of certain metabolites and other compounds, including fiber content, oil content, and the like, or plants displaying desirable colors, taste or smell. The bacteria may be collected from a plant of interest or any material occurring in the environment of interest, including fungi and other animal and plant biota, soil, water, sediments, and other elements of the environment as referred to previously.

[0271] The bacteria (or any microbe according to the disclosure) may be isolated from plant tissue. This isolation can occur from any appropriate tissue in the plant, including for example root, stem and leaves, and plant reproductive tissues. By way of example, conventional methods for isolation from plants typically include the sterile excision of the plant material of interest (e.g. root or stem lengths, leaves), surface sterilization with an appropriate solution (e.g. 2% sodium hypochlorite), after which the plant material is placed on nutrient medium for microbial growth. Alternatively, the surface-sterilized plant material can be crushed in a sterile liquid (usually water) and the liquid suspension, including small pieces of the crushed plant material spread over the surface of a suitable solid agar medium, or media, which may or may not be selective (e.g. contain only phytic acid as a source of phosphorus). This approach is especially useful for bacteria which form isolated colonies and can be picked off individually to separate plates of nutrient medium, and further purified to a single species by well-known methods. Alternatively, the plant root or foliage samples may not be surface sterilized but only washed gently thus including surface-dwelling epiphytic microorganisms in the isolation process, or the epiphytic microbes can be isolated separately, by imprinting and lifting off pieces of plant roots, stem or leaves onto the surface of an agar medium and then isolating individual colonies as above. This approach is especially useful for bacteria, for example. Alternatively, the roots may be processed without washing off small quantities of soil attached to the roots, thus including microbes that colonize the plant rhizosphere. Otherwise, soil adhering to the roots can be removed, diluted and spread out onto agar of suitable selective and non-selective media to isolate individual colonies of rhizospheric bacteria.

### Budapest Treaty on the International Recognition of the Deposit of Microorganisms for the Purpose of Patent Procedures

[0272] The microbial deposits of the present disclosure were made under the provisions of the Budapest Treaty on the International Recognition of the Deposit of Microorganisms for the Purpose of Patent Procedure (Budapest Treaty).

[0273] Applicants state that pursuant to 37 C.F.R. § 1.808 (a)(2) “all restrictions imposed by the depositor on the availability to the public of the deposited material will be irrevocably removed upon the granting of the patent.” This statement is subject to paragraph (b) of this section (i.e. 37 C.F.R. § 1.808 (b)).

[0274] The Enterobacter sacchari has now been reclassified as Kosakonia sacchari, the name for the organism may be used interchangeably throughout the manuscript.

[0275] Many microbes of the present disclosure are derived from two wild-type strains, as depicted in FIG. 6 and FIG. 7. Strain CI006 is a bacterial species previously classified in the genus Enterobacter (see aforementioned reclassification into Kosakonia), and FIG. 6 identifies the lineage of the mutants that have been derived from CI006. Strain CI019 is a bacterial species classified in the genus Rahnella, and FIG. 7 identifies the lineage of the mutants that have been derived from CI019. With regard to FIG. 6 and FIG. 7, it is noted that strains comprising CM in the name are mutants of the strains depicted immediately to the left of said CM strain. The deposit information for the CI006 Kosakonia wild type (WT) and CI019 Rahnella WT are found in the below Table 1.

[0276] Some microorganisms described in this application were deposited on Jan. 6, 2017 or Aug. 11, 2017 with the Bigelow National Center for Marine Algae and Microbiota (NCMA), located at 60 Bigelow Drive, East Boothbay, Me. 04544, USA. As aforementioned, all deposits were made under the terms of the Budapest Treaty on the International Recognition of the Deposit of Microorganisms for the Purposes of Patent Procedure. The Bigelow National Center for Marine Algae and Microbiota accession numbers and dates of deposit for the aforementioned Budapest Treaty deposits are provided in Table 1.

[0277] Biologically pure cultures of Kosakonia sacchari (WT), Rahnella aquatilis (WT), and a variant/remodeled Kosakonia sacchari strain were deposited on Jan. 6, 2017 with the Bigelow National Center for Marine Algae and Microbiota (NCMA), located at 60 Bigelow Drive, East Boothbay, Me. 04544, USA, and assigned NCMA Patent Deposit Designation numbers 201701001, 201701003, and 201701002, respectively. The applicable deposit information is found below in Table 1.

[0278] Biologically pure cultures of variant/remodeled Kosakonia sacchari strains were deposited on Aug. 11, 2017 with the Bigelow National Center for Marine Algae and Microbiota (NCMA), located at 60 Bigelow Drive, East Boothbay, Me. 04544, USA, and assigned NCMA Patent Deposit Designation numbers 201708004, 201708003, and 201708002, respectively. The applicable deposit information is found below in Table 1.

[0279] A biologically pure culture of Klebsiella variicola (WT) was deposited on Aug. 11, 2017 with the Bigelow National Center for Marine Algae and Microbiota (NCMA), located at 60 Bigelow Drive, East Boothbay, Me. 04544, USA, and assigned NCMA Patent Deposit Designation number 201708001. Biologically pure cultures of two Klebsiella variicola variants/remodeled strains were deposited on Dec. 20, 2017 with the Bigelow National Center for Marine Algae and Microbiota (NCMA), located at 60 Bigelow Drive, East Boothbay, Me. 04544, USA, and assigned NCMA Patent Deposit Designation numbers 201712001 and 201712002, respectively. The applicable deposit information is found below in Table 1.

TABLE 1
Microorganisms Deposited under the Budapest Treaty

| | Pivot Strain | | | |
|---|---|---|---|---|
| | Designation | | | |
| | (some strains | | | |
| | have multiple | | Accession | Date of |
| Depository | designations) | Taxonomy | Number | Deposit |
| NCMA | CI006, | Kosakonia sacchari (WT) | 201701001 | Jan. 6, 2017 |
| | PBC6.1, 6 | | | |
| NCMA | CI019, 19 | Rahnella aquatilis (WT) | 201701003 | Jan. 6, 2017 |
| NCMA | CM029, 6-412 | Kosakonia sacchari | 201701002 | Jan. 6, 2017 |
| NCMA | 6-403 CM037 | Kosakonia sacchari | 201708004 | Aug. 11, 2017 |
| NCMA | 6-404, CM38, | Kosakonia sacchari | 201708003 | Aug. 11, 2017 |
| | PBC6.38 | | | |
| NCMA | CM094, 6-881, | Kosakonia sacchari | 201708002 | Aug. 11, 2017 |
| | PBC6.94 | | | |
| NCMA | CI137, 137, | Klebsiella variicola (WT) | 201708001 | Aug. 11, 2017 |
| | PB137 | | | |
| NCMA | 137-1034 | Klebsiella variicola | 201712001 | Dec. 20, 2017 |
| NCMA | 137-1036 | Klebsiella variicola | 201712002 | Dec. 20, 2017 |

### Isolated and Biologically Pure Microorganisms

[0280] The present disclosure, in certain embodiments, provides isolated and biologically pure microorganisms that have applications, inter alia, in agriculture. The disclosed microorganisms can be utilized in their isolated and biologically pure states, as well as being formulated into compositions (see below section for exemplary composition descriptions). Furthermore, the disclosure provides microbial compositions containing at least two members of the disclosed isolated and biologically pure microorganisms, as well as methods of utilizing said microbial compositions. Furthermore, the disclosure provides for methods of modulating nitrogen fixation in plants via the utilization of the disclosed isolated and biologically pure microbes.

[0281] In some aspects, the isolated and biologically pure microorganisms of the disclosure are those from Table 1. In other aspects, the isolated and biologically pure microorganisms of the disclosure are derived from a microorganism of Table 1. For example, a strain, child, mutant, or derivative, of a microorganism from Table 1 are provided herein. The disclosure contemplates all possible combinations of microbes listed in Table 1, said combinations sometimes forming a microbial consortia. The microbes from Table 1, either individually or in any combination, can be combined with any plant, active molecule (synthetic, organic, etc.), adjuvant, carrier, supplement, or biological, mentioned in the disclosure.

[0282] In some aspects, the disclosure provides microbial compositions comprising species as grouped in Tables 2-8. In some aspects, these compositions comprising various microbial species are termed a microbial consortia or consortium.

[0283] With respect to Tables 2-8, the letters A through I represent a non-limiting selection of microorganisms of the present disclosure, defined as:

[0284] A=Microbe with accession number 201701001 identified in Table 1;

[0285] B=Microbe with accession number 201701003 identified in Table 1;

[0286] C=Microbe with accession number 201701002 identified in Table 1;

[0287] D=Microbe with accession number 201708004 identified in Table 1;

[0288] E=Microbe with accession number 201708003 identified in Table 1;

[0289] F=Microbe with accession number 201708002 identified in Table 1;

[0290] G=Microbe with accession number 201708001 identified in Table 1;

[0291] H=Microbe with accession number 201712001 identified in Table 1; and

[0292] I=Microbe with accession number 201712002 identified in Table 1.

TABLE 2
Eight and Nine Strain Compositions

| | | | | | |
|---|---|---|---|---|---|
| A, B, C, D, E, F, G, H | A, B, C, D, E, F, G, I | A, B, C, D, E, F, H, I | A, B, C, D, E, G, H, I | A, B, C, D, F, G, H, I | A, B, C, E, F, G, H, I |
| A, B, D, E, F, G, H, I | A, C, D, E, F, G, H, I | B, C, D, E, F, G, H, I | A, B, C, D, E, F, G, H, I | | |

TABLE 3
Seven Strain Compositions

| | | | | | |
|---|---|---|---|---|---|
| A, B, C, D, E, F, G | A, B, C, D, E, F, H | A, B, C, D, E, F, I | A, B, C, D, E, G, H | A, B, C, D, E, G, I | A, B, C, D, E, H, I |
| A, B, C, D, F, G, H | A, B, C, D, F, G, I | A, B, C, D, F, H, I | A, B, C, D, G, H, I | A, B, C, E, F, G, H | A, B, C, E, F, G, I |
| A, B, C, E, F, H, I | A, B, C, E, G, H, I | A, B, C, F, G, H, I | A, B, D, E, F, G, H | A, B, D, E, F, G, I | A, B, D, E, F, H, I |
| A, B, D, E, G, H, I | A, B, D, F, G, H, I | A, B, E, F, G, H, I | A, C, D, E, F, G, H | A, C, D, E, F, G, I | A, C, D, E, F, H, I |
| A, C, D, E, G, H, I | A, C, D, F, G, H, I | A, C, E, F, G, H, I | A, D, E, F, G, H, I | B, C, D, E, F, G, H | B, C, D, E, F, G, I |
| B, C, D, E, F, H, I | B, C, D, E, G, H, I | B, C, D, F, G, H, I | B, C, E, F, G, H, I | B, D, E, F, G, H, I | C, D, E, F, G, H, I |

TABLE 4
Six Strain Compositions

| | | | | | | |
|---|---|---|---|---|---|---|
| A, B, C, D, E, F | A, B, C, D, E, G | A, B, C, D, E, H | A, B, C, D, E, I | A, B, C, D, F, G | A, B, C, D, F, H | A, B, C, D, F, I |
| A, B, C, D, G, H | A, B, C, D, G, I | A, B, C, D, H, I | A, B, C, E, F, G | A, B, C, E, F, H | A, B, C, E, F, I | A, B, C, E, G, H |
| A, B, C, E, G, I | A, B, C, E, H, I | A, B, C, F, G, H | A, B, C, F, G, I | A, B, C, F, H, I | A, B, C, G, H, I | A, B, D, E, F, G |
| A, B, D, E, F, H | A, B, D, E, F, I | A, B, D, E, G, H | A, B, D, E, G, I | A, B, D, E, H, I | A, B, D, F, G, H | A, B, D, F, G, I |
| D, E, F, G, H, I | C, E, F, G, H, I | A, B, D, F, H, I | A, B, D, G, H, I | A, B, E, F, G, H | A, B, E, F, G, I | A, B, E, F, H, I |
| A, B, E, G, H, I | A, B, F, G, H, I | A, C, D, E, F, G | A, C, D, E, F, H | A, C, D, E, F, I | A, C, D, E, G, H | A, C, D, E, G, I |
| A, C, D, E, H, I | A, C, D, F, G, H | A, C, D, F, G, I | A, C, D, F, H, I | A, C, D, G, H, I | A, C, E, F, G, H | A, C, E, F, G, I |
| A, C, E, F, H, I | A, C, E, G, H, I | A, C, F, G, H, I | A, D, E, F, G, H | A, D, E, F, G, I | A, D, E, F, H, I | A, D, E, G, H, I |
| A, D, F, G, H, I | A, E, F, G, H, I | B, C, D, E, F, G | B, C, D, E, F, H | B, C, D, E, F, I | B, C, D, E, G, H | B, C, D, E, G, I |
| B, C, D, E, H, I | B, C, D, F, G, H | B, C, D, F, G, I | B, C, D, F, H, I | B, C, D, G, H, I | B, C, E, F, G, H | B, C, E, F, G, I |
| B, C, E, F, H, I | B, C, E, G, H, I | B, C, F, G, H, I | B, D, E, F, G, H | B, D, E, F, G, I | B, D, E, F, H, I | B, D, E, G, H, I |
| B, D, F, G, H, I | B, E, F, G, H, I | C, D, E, F, G, H | C, D, E, F, G, I | C, D, E, F, H, I | C, D, E, G, H, I | C, D, F, G, H, I |

TABLE 5
Five Strain Compositions

| | | | | | | | |
|---|---|---|---|---|---|---|---|
| A, B, C, D, E | A, B, C, D, F | A, B, C, D, G | A, B, C, D, H | A, B, C, D, I | A, B, C, E, F | A, B, C, E, G | A, B, C, E, H |
| A, B, C, F, H | A, B, C, F, G | A, B, C, F, I | A, B, C, G, H | A, B, C, G, I | A, B, C, H, I | A, B, D, E, F | A, B, D, E, G |
| A, B, D, E, I | A, B, D, F, G | A, B, D, F, H | A, B, D, F, I | A, B, D, G, H | A, B, D, G, I | A, B, D, H, I | A, B, E, F, G |
| A, B, E, F, I | A, B, E, G, H | A, B, E, G, I | A, B, E, H, I | A, B, F, G, H | A, B, F, G, I | A, B, F, H, I | A, B, G, H, I |
| A, C, D, E, G | A, C, D, E, H | A, C, D, E, I | A, C, D, F, G | A, C, D, F, H | A, C, D, F, I | A, C, D, G, H | A, C, D, G, I |
| A, C, E, F, G | A, C, E, F, H | A, C, E, F, I | A, C, E, G, H | A, C, E, G, I | A, C, E, H, I | A, C, F, G, H | A, C, F, G, I |
| A, C, G, H, I | A, D, E, F, G | A, D, E, F, H | A, D, E, F, I | A, D, E, G, H | A, D, E, G, I | A, D, E, H, I | A, D, F, G, H |
| A, D, F, H, I | A, D, G, H, I | A, E, F, G, H | A, E, F, G, I | A, E, F, H, I | A, E, G, H, I | A, F, G, H, I | B, C, D, E, F |
| B, C, D, E, H | B, C, D, E, I | B, C, D, F, G | B, C, D, F, H | B, C, D, F, I | B, C, D, G, H | B, C, D, G, I | B, C, D, H, I |
| B, C, E, F, H | B, C, E, F, I | B, C, E, G, H | B, C, E, G, I | B, C, E, H, I | B, C, F, G, H | B, C, F, G, I | B, C, F, H, I |
| B, D, E, F, G | B, D, E, F, H | B, D, E, F, I | B, D, E, G, H | B, D, E, G, I | B, D, E, H, I | B, D, F, G, H | B, D, F, G, I |
| B, D, G, H, I | B, E, F, G, H | B, E, F, G, I | B, E, F, H, I | B, E, G, H, I | B, F, G, H, I | C, D, E, F, G | C, D, E, F, H |
| C, D, E, G, H | C, D, E, G, I | C, D, E, H, I | C, D, F, G, H | C, D, F, G, I | C, D, F, H, I | C, D, G, H, I | C, E, F, G, H |
| C, E, F, H, I | C, E, G, H, I | C, F, G, H, I | D, E, F, G, H | D, E, F, G, I | D, E, F, H, I | D, E, G, H, I | D, F, G, H, I |
| A, B, C, E, I | A, B, D, E, H | A, B, E, F, H | A, C, D, E, F | A, C, D, H, I | A, C, F, H, I | A, D, F, G, I | B, C, D, E, G |
| B, C, E, F, G | B, C, G, H, I | B, D, F, H, I | C, D, E, F, I | C, E, F, G, I | E, F, G, H, I | | |

TABLE 6
Four Strain Compositions

| | | | | | | | | |
|---|---|---|---|---|---|---|---|---|
| A, B, C, D | A, B, C, E | A, B, C, F | A, B, C, G | A, B, C, H | A, B, C, I | A, B, D, E | A, B, D, F | D, G, H, I |
| A, B, D, G | A, B, D, H | A, B, D, I | A, B, E, F | A, B, E, G | A, B, E, H | A, B, E, I | A, B, F, G | E, F, G, H |
| A, B, F, H | A, D, F, H | A, D, F, I | A, D, G, H | A, D, G, I | A, D, H, I | A, E, F, G | A, E, F, H | E, F, G, I |
| A, B, F, I | A, B, G, H | A, B, G, I | A, B, H, I | A, C, D, E | A, C, D, F | A, C, D, G | A, C, D, H | E, F, H, I |
| A, C, D, I | A, C, E, F | A, C, E, G | A, C, E, H | A, C, E, I | A, C, F, G | A, C, F, H | A, C, F, I | E, G, H, I |
| A, C, G, H | A, C, G, I | A, C, H, I | A, D, E, F | A, D, E, G | A, D, E, H | A, D, E, I | A, D, F, G | F, G, H, I |
| A, E, F, I | A, E, G, H | A, E, G, I | A, E, H, I | A, F, G, H | A, F, G, I | A, F, H, I | A, G, H, I | D, E, F, H |
| B, C, D, E | B, C, D, F | B, C, D, G | B, C, D, H | B, C, D, I | B, C, E, F | B, C, E, G | B, C, E, H | D, E, F, I |
| B, C, E, I | B, C, F, G | B, C, F, H | B, C, F, I | B, C, G, H | B, C, G, I | B, C, H, I | B, D, E, F | D, E, G, H |
| B, D, E, G | B, D, E, H | B, D, E, I | B, D, F, G | B, D, F, H | B, D, F, I | B, D, G, H | B, D, G, I | D, E, G, I |
| B, D, H, I | B, E, F, G | B, E, F, H | B, E, F, I | B, E, G, H | B, E, G, I | B, E, H, I | B, F, G, H | D, E, H, I |
| B, F, G, I | B, F, H, I | B, G, H, I | C, D, E, F | C, D, E, G | C, D, E, H | C, D, E, I | C, D, F, G | D, F, G, H |
| C, D, F, H | C, D, F, I | C, D, G, H | C, D, G, I | C, D, H, I | C, E, F, G | C, E, F, H | C, E, F, I | D, F, G, I |
| C, E, G, H | C, E, G, I | C, E, H, I | C, F, G, H | C, F, G, I | C, F, H, I | C, G, H, I | D, E, F, G | D, F, H, I |

TABLE 7
Three Strain Compositions

| | | | | | | | | | | |
|---|---|---|---|---|---|---|---|---|---|---|
| A, B, C | A, B, D | A, B, E | A, B, F | A, B, G | A, B, H | A, B, I | A, C, D | A, C, E | G, H, I | E, F, H |
| A, C, F | A, C, G | A, C, H | A, C, I | A, D, E | A, D, F | A, D, G | A, D, H | A, D, I | F, H, I | E, F, G |
| A, E, F | A, E, G | A, E, H | A, E, I | A, F, G | A, F, H | A, F, I | A, G, H | A, G, I | F, G, I | D, H, I |
| A, H, I | B, C, D | B, C, E | B, C, F | B, C, G | B, C, H | B, C, I | B, D, E | B, D, F | F, G, H | D, G, I |
| B, D, G | B, D, H | B, D, I | B, E, F | B, E, G | B, E, H | B, E, I | B, F, G | B, F, H | E, H, I | E, F, I |
| B, F, I | B, G, H | B, G, I | B, H, I | C, D, E | C, D, F | C, D, G | C, D, H | C, D, I | E, G, I | D, G, H |
| C, E, F | C, E, G | C, E, H | C, E, I | C, F, G | C, F, H | C, F, I | C, G, H | C, G, I | E, G, H | D, F, I |
| C, H, I | D, E, F | D, E, G | D, E, H | D, E, I | D, F, G | D, F, H | | | | |

TABLE 8
Two Strain Compositions

| | | | | | | | | | | | | | | | |
|---|---|---|---|---|---|---|---|---|---|---|---|---|---|---|---|
| A, B | A, C | A, D | A, E | A, F | A, G | A, H | A, I | B, C | B, D | B, E | B, F | B, G | B, H | B, I | C, D |
| C, E | C, F | C, G | C, H | C, I | D, E | D, F | D, G | D, H | D, I | E, F | E, G | E, H | E, I | F, G | F, H |
| F, I | G, H | G, I | H, I | | | | | | | | | | | | |

[0293] In some embodiments, microbial compositions may be selected from any member group from Tables 2-8.

### Agricultural Compositions

[0294] Compositions comprising bacteria or bacterial populations produced according to methods described herein and/or having characteristics as described herein can be in the form of a liquid, a foam, or a dry product. Compositions comprising bacteria or bacterial populations produced according to methods described herein and/or having characteristics as described herein may also be used to improve plant traits. In some examples, a composition comprising bacterial populations may be in the form of a dry powder, a slurry of powder and water, or a flowable seed treatment. The compositions comprising bacterial populations may be coated on a surface of a seed, and may be in liquid form.

[0295] The composition can be fabricated in bioreactors such as continuous stirred tank reactors, batch reactors, and on the farm. In some examples, compositions can be stored in a container, such as a jug or in mini bulk. In some examples, compositions may be stored within an object selected from the group consisting of a bottle, jar, ampule, package, vessel, bag, box, bin, envelope, carton, container, silo, shipping container, truck bed, and/or case.

[0296] Compositions may also be used to improve plant traits. In some examples, one or more compositions may be coated onto a seed. In some examples, one or more compositions may be coated onto a seedling. In some examples, one or more compositions may be coated onto a surface of a seed. In some examples, one or more compositions may be coated as a layer above a surface of a seed. In some examples, a composition that is coated onto a seed may be in liquid form, in dry product form, in foam form, in a form of a slurry of powder and water, or in a flowable seed treatment. In some examples, one or more compositions may be applied to a seed and/or seedling by spraying, immersing, coating, encapsulating, and/or dusting the seed and/or seedling with the one or more compositions. In some examples, multiple bacteria or bacterial populations can be coated onto a seed and/or a seedling of the plant. In some examples, at least two, at least three, at least four, at least five, at least six, at least seven, at least eight, at least nine, at least ten, or more than ten bacteria of a bacterial combination can be selected from one of the following genera: Acidovorax, Agrobacterium, Bacillus, Burkholderia, Chryseobacterium, Curtobacterium, Enterobacter, Escherichia, Methylobacterium, Paenibacillus, Pantoea, Pseudomonas, Ralstonia, Saccharibacillus, Sphingomonas, and Stenotrophomonas.

[0297] In some examples, at least two, at least three, at least four, at least five, at least six, at least seven, at least eight, at least nine, at least ten, or more than ten bacteria and bacterial populations of an endophytic combination are selected from one of the following families: Bacillaceae, Burkholderiaceae, Comamonadaceae, Enterobacteriaceae, Flavobacteriaceae, Methylobacteriaceae, Microbacteriaceae, Paenibacillileae, Pseudomonnaceae, Rhizobiaceae, Sphingomonadaceae, Xanthomonadaceae, Cladosporiaceae, Gnomoniaceae, Incertae sedis, Lasiosphaeriaceae, Netriaceae, and Pleosporaceae.

[0298] In some examples, at least two, at least three, at least four, at least five, at least six, at least seven, at least eight, at least night, at least ten, or more than ten bacteria and bacterial populations of an endophytic combination are selected from one of the following families: Bacillaceae, Burkholderiaceae, Comamonadaceae, Enterobacteriaceae, Flavobacteriaceae, Methylobacteriaceae, Microbacteriaceae, Paenibacillileae, Pseudomonnaceae, Rhizobiaceae, Sphingomonadaceae, Xanthomonadaceae, Cladosporiaceae, Gnomoniaceae, Incertae sedis, Lasiosphaeriaceae, Netriaceae, Pleosporaceae.

[0299] Examples of compositions may include seed coatings for commercially important agricultural crops, for example, sorghum, canola, tomato, strawberry, barley, rice, maize, and wheat. Examples of compositions can also include seed coatings for corn, soybean, canola, sorghum, potato, rice, vegetables, cereals, and oilseeds. Seeds as provided herein can be genetically modified organisms (GMO), non-GMO, organic, or conventional. In some examples, compositions may be sprayed on the plant aerial parts, or applied to the roots by inserting into furrows in which the plant seeds are planted, watering to the soil, or dipping the roots in a suspension of the composition. In some examples, compositions may be dehydrated in a suitable manner that maintains cell viability and the ability to artificially inoculate and colonize host plants. The bacterial species may be present in compositions at a concentration of between 10⁸ to 10¹⁰ CFU/ml. In some examples, compositions may be supplemented with trace metal ions, such as molybdenum ions, iron ions, manganese ions, or combinations of these ions. The concentration of ions in examples of compositions as described herein may between about 0.1 mM and about 50 mM. Some examples of compositions may also be formulated with a carrier, such as beta-glucan, carboxylmethyl cellulose (CMC), bacterial extracellular polymeric substance (EPS), sugar, animal milk, or other suitable carriers. In some examples, peat or planting materials can be used as a carrier, or biopolymers in which a composition is entrapped in the biopolymer can be used as a carrier. The compositions comprising the bacterial populations described herein can improve plant traits, such as promoting plant growth, maintaining high chlorophyll content in leaves, increasing fruit or seed numbers, and increasing fruit or seed unit weight.

[0300] The compositions comprising the bacterial populations described herein may be coated onto the surface of a seed. As such, compositions comprising a seed coated with one or more bacteria described herein are also contemplated. The seed coating can be formed by mixing the bacterial population with a porous, chemically inert granular carrier. Alternatively, the compositions may be inserted directly into the furrows into which the seed is planted or sprayed onto the plant leaves or applied by dipping the roots into a suspension of the composition. An effective amount of the composition can be used to populate the sub-soil region adjacent to the roots of the plant with viable bacterial growth, or populate the leaves of the plant with viable bacterial growth. In general, an effective amount is an amount sufficient to result in plants with improved traits (e.g. a desired level of nitrogen fixation).

[0301] Bacterial compositions described herein can be formulated using an agriculturally acceptable carrier. The formulation useful for these embodiments may include at least one member selected from the group consisting of a tackifier, a microbial stabilizer, a fungicide, an antibacterial agent, a preservative, a stabilizer, a surfactant, an anti-complex agent, an herbicide, a nematicide, an insecticide, a plant growth regulator, a fertilizer, a rodenticide, a desiccant, a bactericide, a nutrient, and any combination thereof. In some examples, compositions may be shelf-stable. For example, any of the compositions described herein can include an agriculturally acceptable carrier (e.g., one or more of a fertilizer such as a non-naturally occurring fertilizer, an adhesion agent such as a non-naturally occurring adhesion agent, and a pesticide such as a non-naturally occurring pesticide). A non-naturally occurring adhesion agent can be, for example, a polymer, copolymer, or synthetic wax. For example, any of the coated seeds, seedlings, or plants described herein can contain such an agriculturally acceptable carrier in the seed coating. In any of the compositions or methods described herein, an agriculturally acceptable carrier can be or can include a non-naturally occurring compound (e.g., a non-naturally occurring fertilizer, a non-naturally occurring adhesion agent such as a polymer, copolymer, or synthetic wax, or a non-naturally occurring pesticide). Non-limiting examples of agriculturally acceptable carriers are described below. Additional examples of agriculturally acceptable carriers are known in the art.

[0302] In some cases, bacteria are mixed with an agriculturally acceptable carrier. The carrier can be a solid carrier or liquid carrier, and in various forms including microspheres, powders, emulsions and the like. The carrier may be any one or more of a number of carriers that confer a variety of properties, such as increased stability, wettability, or dispersability. Wetting agents such as natural or synthetic surfactants, which can be nonionic or ionic surfactants, or a combination thereof can be included in the composition. Water-in-oil emulsions can also be used to formulate a composition that includes the isolated bacteria (see, for example, U.S. Pat. No. 7,485,451). Suitable formulations that may be prepared include wettable powders, granules, gels, agar strips or pellets, thickeners, and the like, microencapsulated particles, and the like, liquids such as aqueous flowables, aqueous suspensions, water-in-oil emulsions, etc. The formulation may include grain or legume products, for example, ground grain or beans, broth or flour derived from grain or beans, starch, sugar, or oil.

[0303] In some embodiments, the agricultural carrier may be soil or a plant growth medium. Other agricultural carriers that may be used include water, fertilizers, plant-based oils, humectants, or combinations thereof. Alternatively, the agricultural carrier may be a solid, such as diatomaceous earth, loam, silica, alginate, clay, bentonite, vermiculite, seed cases, other plant and animal products, or combinations, including granules, pellets, or suspensions. Mixtures of any of the aforementioned ingredients are also contemplated as carriers, such as but not limited to, pesta (flour and kaolin clay), agar or flour-based pellets in loam, sand, or clay, etc. Formulations may include food sources for the bacteria, such as barley, rice, or other biological materials such as seed, plant parts, sugar cane bagasse, hulls or stalks from grain processing, ground plant material or wood from building site refuse, sawdust or small fibers from recycling of paper, fabric, or wood.

[0304] For example, a fertilizer can be used to help promote the growth or provide nutrients to a seed, seedling, or plant. Non-limiting examples of fertilizers include nitrogen, phosphorous, potassium, calcium, sulfur, magnesium, boron, chloride, manganese, iron, zinc, copper, molybdenum, and selenium (or a salt thereof). Additional examples of fertilizers include one or more amino acids, salts, carbohydrates, vitamins, glucose, NaCl, yeast extract, NH₄H₂PO₄, (NH₄)₂SO₄, glycerol, valine, L-leucine, lactic acid, propionic acid, succinic acid, malic acid, citric acid, KH tartrate, xylose, lyxose, and lecithin. In one embodiment, the formulation can include a tackifier or adherent (referred to as an adhesive agent) to help bind other active agents to a substance (e.g., a surface of a seed). Such agents are useful for combining bacteria with carriers that can contain other compounds (e.g., control agents that are not biologic), to yield a coating composition. Such compositions help create coatings around the plant or seed to maintain contact between the microbe and other agents with the plant or plant part. In one embodiment, adhesives are selected from the group consisting of: alginate, gums, starches, lecithins, formononetin, polyvinyl alcohol, alkali formononetinate, hesperetin, polyvinyl acetate, cephalins, Gum Arabic, Xanthan Gum, Mineral Oil, Polyethylene Glycol (PEG), Polyvinyl pyrrolidone (PVP), Arabino-galactan, Methyl Cellulose, PEG 400, Chitosan, Polyacrylamide, Polyacrylate, Polyacrylonitrile, Glycerol, Triethylene glycol, Vinyl Acetate, Gellan Gum, Polystyrene, Polyvinyl, Carboxymethyl cellulose, Gum Ghatti, and polyoxyethylene-polyoxybutylene block copolymers.

[0305] In some embodiments, the adhesives can be, e.g. a wax such as carnauba wax, beeswax, Chinese wax, shellac wax, spermaceti wax, candelilla wax, castor wax, ouricury wax, and rice bran wax, a polysaccharide (e.g., starch, dextrins, maltodextrins, alginate, and chitosans), a fat, oil, a protein (e.g., gelatin and zeins), gum arables, and shellacs. Adhesive agents can be non-naturally occurring compounds, e.g., polymers, copolymers, and waxes. For example, non-limiting examples of polymers that can be used as an adhesive agent include: polyvinyl acetates, polyvinyl acetate copolymers, ethylene vinyl acetate (EVA) copolymers, polyvinyl alcohols, polyvinyl alcohol copolymers, celluloses (e.g., ethylcelluloses, methylcelluloses, hydroxymethylcelluloses, hydroxypropylcelluloses, and carboxymethylcelluloses), polyvinylpyrolidones, vinyl chloride, vinylidene chloride copolymers, calcium lignosulfonates, acrylic copolymers, polyvinylacrylates, polyethylene oxide, acylamide polymers and copolymers, polyhydroxyethyl acrylate, methylacrylamide monomers, and polychloroprene.

[0306] In some examples, one or more of the adhesion agents, anti-fungal agents, growth regulation agents, and pesticides (e.g., insecticide) are non-naturally occurring compounds (e.g., in any combination). Additional examples of agriculturally acceptable carriers include dispersants (e.g., polyvinylpyrrolidone/vinyl acetate PVPIVA S-630), surfactants, binders, and filler agents.

[0307] The formulation can also contain a surfactant. Non-limiting examples of surfactants include nitrogen-surfactant blends such as Prefer 28 (Cenex), Surf-N(US), Inhance (Brandt), P-28 (Wilfarm) and Patrol (Helena); esterified seed oils include Sun-It II (AmCy), MSO (UAP), Scoil (Agsco), Hasten (Wilfarm) and Mes-100 (Drexel); and organo-silicone surfactants include Silwet L77 (UAP), Silikin (Terra), Dyne-Amic (Helena), Kinetic (Helena), Sylgard 309 (Wilbur-Ellis) and Century (Precision). In one embodiment, the surfactant is present at a concentration of between 0.01% v/v to 10% v/v. In another embodiment, the surfactant is present at a concentration of between 0.1% v/v to 1% v/v.

[0308] In certain cases, the formulation includes a microbial stabilizer. Such an agent can include a desiccant, which can include any compound or mixture of compounds that can be classified as a desiccant regardless of whether the compound or compounds are used in such concentrations that they in fact have a desiccating effect on a liquid inoculant. Such desiccants are ideally compatible with the bacterial population used, and should promote the ability of the microbial population to survive application on the seeds and to survive desiccation. Examples of suitable desiccants include one or more of trehalose, sucrose, glycerol, and Methylene glycol. Other suitable desiccants include, but are not limited to, non-reducing sugars and sugar alcohols (e.g., mannitol or sorbitol). The amount of desiccant introduced into the formulation can range from about 5% to about 50% by weight/volume, for example, between about 10% to about 40%, between about 15% to about 35%, or between about 20% to about 30%. In some cases, it is advantageous for the formulation to contain agents such as a fungicide, an antibacterial agent, an herbicide, a nematicide, an insecticide, a plant growth regulator, a rodenticide, bactericide, or a nutrient. In some examples, agents may include protectants that provide protection against seed surface-borne pathogens. In some examples, protectants may provide some level of control of soil-borne pathogens. In some examples, protectants may be effective predominantly on a seed surface.

[0309] In some examples, a fungicide may include a compound or agent, whether chemical or biological, that can inhibit the growth of a fungus or kill a fungus. In some examples, a fungicide may include compounds that may be fungistatic or fungicidal. In some examples, fungicide can be a protectant, or agents that are effective predominantly on the seed surface, providing protection against seed surface-borne pathogens and providing some level of control of soil-borne pathogens. Non-limiting examples of protectant fungicides include captan, maneb, thiram, or fludioxonil.

[0310] In some examples, fungicide can be a systemic fungicide, which can be absorbed into the emerging seedling and inhibit or kill the fungus inside host plant tissues. Systemic fungicides used for seed treatment include, but are not limited to the following: azoxystrobin, carboxin, mefenoxam, metalaxyl, thiabendazole, trifloxystrobin, and various triazole fungicides, including difenoconazole, ipconazole, tebuconazole, and triticonazole. Mefenoxam and metalaxyl are primarily used to target the water mold fungi Pythium and Phytophthora. Some fungicides are preferred over others, depending on the plant species, either because of subtle differences in sensitivity of the pathogenic fungal species, or because of the differences in the fungicide distribution or sensitivity of the plants. In some examples, fungicide can be a biological control agent, such as a bacterium or fungus. Such organisms may be parasitic to the pathogenic fungi, or secrete toxins or other substances which can kill or otherwise prevent the growth of fungi. Any type of fungicide, particularly ones that are commonly used on plants, can be used as a control agent in a seed composition.

[0311] In some examples, the seed coating composition comprises a control agent that has antibacterial properties. In one embodiment, the control agent with antibacterial properties is selected from the compounds described herein elsewhere. In another embodiment, the compound is Streptomycin, oxytetracycline, oxolinic acid, or gentamicin. Other examples of antibacterial compounds which can be used as part of a seed coating composition include those based on dichlorophene and benzylalcohol hemi formal (Proxel® from ICI or Acticide® RS from Thor Chemie and Kathon® MK 25 from Rohm & Haas) and isothiazolinone derivatives such as alkylisothiazolinones and benzisothiazolinones (Acticide® MBS from Thor Chemie).

[0312] In some examples, growth regulator is selected from the group consisting of: Abscisic acid, amidochlor, ancymidol, 6-benzylaminopurine, brassinolide, butralin, chlormequat (chlormequat chloride), choline chloride, cyclanilide, daminozide, dikegulac, dimethipin, 2,6-dimethylpuridine, ethephon, flumetralin, flurprimidol, fluthiacet, forchlorfenuron, gibberellic acid, inabenfide, indole-3-acetic acid, maleic hydrazide, mefluidide, mepiquat (mepiquat chloride), naphthaleneacetic acid, N-6-benzyladenine, paclobutrazol, prohexadione phosphorotrithioate, 2,3,5-tri-iodobenzoic acid, trinexapac-ethyl and uniconazole. Additional non-limiting examples of growth regulators include brassinosteroids, cytokinins (e.g., kinetin and zeatin), auxins (e.g., indolylacetic acid and indolylacetyl aspartate), flavonoids and isoflavanoids (e.g., formononetin and diosmetin), phytoaixins (e.g., glyceolline), and phytoalexin-inducing oligosaccharides (e.g., pectin, chitin, chitosan, polygalacuronic acid, and oligogalacturonic acid), and gibellerins. Such agents are ideally compatible with the agricultural seed or seedling onto which the formulation is applied (e.g., it should not be deleterious to the growth or health of the plant). Furthermore, the agent is ideally one which does not cause safety concerns for human, animal or industrial use (e.g., no safety issues, or the compound is sufficiently labile that the commodity plant product derived from the plant contains negligible amounts of the compound).

[0313] Some examples of nematode-antagonistic biocontrol agents include ARF18; 30 Arthrobotrys spp.; Chaetomium spp.; Cylindrocarpon spp.; Exophilia spp.; Fusarium spp.; Gliocladium spp.; Hirsutella spp.; Lecanicillium spp.; Monacrosporium spp.; Myrothecium spp.; Neocosmospora spp.; Paecilomyces spp.; Pochonia spp.; Stagonospora spp.; vesicular-arbuscular mycorrhizal fungi, Burkholderia spp.; Pasteuria spp., Brevibacillus spp.; Pseudomonas spp.; and Rhizobacteria. Particularly preferred nematode-antagonistic biocontrol agents include ARF18, Arthrobotrys oligospora, Arthrobotrys dactyloides, Chaetomium globosum, Cylindrocarpon heteronema, Exophilia jeanselmei, Exophilia pisciphila, Fusarium aspergilus, Fusarium solani, Gliocladium catenulatum, Gliocladium roseum, Gliocladium vixens, Hirsutella rhossiliensis, Hirsutella minnesotensis, Lecanicillium lecanii, Monacrosporium drechsleri, Monacrosporium gephyropagum, Myrotehcium verrucaria, Neocosmospora vasinfecta, Paecilomyces lilacinus, Pochonia chlamydosporia, Stagonospora heteroderae, Stagonospora phaseoli, vesicular-arbuscular mycorrhizal fungi, Burkholderia cepacia, Pasteuria penetrans, Pasteuria thornei, Pasteuria nishizawae, Pasteuria ramosa, Pasteuria usage, Brevibacillus laterosporus strain G4, Pseudomonas fluorescens and Rhizobacteria.

[0314] Some examples of nutrients can be selected from the group consisting of a nitrogen fertilizer including, but not limited to Urea, Ammonium nitrate, Ammonium sulfate, Non-pressure nitrogen solutions, Aqua ammonia, Anhydrous ammonia, Ammonium thiosulfate, Sulfur-coated urea, Urea-formaldehydes, IBDU, Polymer-coated urea, Calcium nitrate, Ureaform, and Methylene urea, phosphorous fertilizers such as Diammonium phosphate, Monoammonium phosphate, Ammonium polyphosphate, Concentrated superphosphate and Triple superphosphate, and potassium fertilizers such as Potassium chloride, Potassium sulfate, Potassium-magnesium sulfate, Potassium nitrate. Such compositions can exist as free salts or ions within the seed coat composition. Alternatively, nutrients/fertilizers can be complexed or chelated to provide sustained release over time.

[0315] Some examples of rodenticides may include selected from the group of substances consisting of 2-isovalerylindan-1,3-dione, 4-(quinoxalin-2-ylamino) benzenesulfonamide, alpha-chlorohydrin, aluminum phosphide, antu, arsenous oxide, barium carbonate, bisthiosemi, brodifacoum, bromadiolone, bromethalin, calcium cyanide, chloralose, chlorophacinone, cholecalciferol, coumachlor, coumafuryl, coumatetralyl, crimidine, difenacoum, difethialone, diphacinone, ergocalciferol, flocoumafen, fluoroacetamide, flupropadine, flupropadine hydrochloride, hydrogen cyanide, iodomethane, lindane, magnesium phosphide, methyl bromide, norbormide, phosacetim, phosphine, phosphorus, pindone, potassium arsenite, pyrinuron, scilliroside, sodium arsenite, sodium cyanide, sodium fluoroacetate, strychnine, thallium sulfate, warfarin and zinc phosphide.

[0316] In the liquid form, for example, solutions or suspensions, bacterial populations can be mixed or suspended in water or in aqueous solutions. Suitable liquid diluents or carriers include water, aqueous solutions, petroleum distillates, or other liquid carriers.

[0317] Solid compositions can be prepared by dispersing the bacterial populations in and on an appropriately divided solid carrier, such as peat, wheat, bran, vermiculite, clay, talc, bentonite, diatomaceous earth, fuller's earth, pasteurized soil, and the like. When such formulations are used as wettable powders, biologically compatible dispersing agents such as non-ionic, anionic, amphoteric, or cationic dispersing and emulsifying agents can be used.

[0318] The solid carriers used upon formulation include, for example, mineral carriers such as kaolin clay, pyrophyllite, bentonite, montmorillonite, diatomaceous earth, acid white soil, vermiculite, and pearlite, and inorganic salts such as ammonium sulfate, ammonium phosphate, ammonium nitrate, urea, ammonium chloride, and calcium carbonate. Also, organic fine powders such as wheat flour, wheat bran, and rice bran may be used. The liquid carriers include vegetable oils such as soybean oil and cottonseed oil, glycerol, ethylene glycol, polyethylene glycol, propylene glycol, polypropylene glycol, etc.

### Pests

[0319] Agricultural compositions of the disclosure, which may comprise any microbe taught herein, are sometimes combined with one or more pesticides.

[0320] The pesticides that are combined with the microbes of the disclosure may target any of the pests mentioned below.

[0321] “Pest” includes but is not limited to, insects, fungi, bacteria, nematodes, mites, ticks and the like. Insect pests include insects selected from the orders Coleoptera, Diptera, Hymenoptera, Lepidoptera, Mallophaga, Homoptera, Hemiptera Orthroptera, Thysanoptera, Dermaptera, Isoptera, Anoplura, Siphonaptera, Trichoptera, etc., particularly Lepidoptera and Coleoptera.

[0322] Those skilled in the art will recognize that not all compounds are equally effective against all pests. Compounds that may be combined with microbes of the disclosure may display activity against insect pests, which may include economically important agronomic, forest, greenhouse, nursery ornamentals, food and fiber, public and animal health, domestic and commercial structure, household and stored product pests.

[0323] As aforementioned, the agricultural compositions of the disclosure (which may comprise any microbe taught herein) are in embodiments combined with one or more pesticides. These pesticides may be active against any of the following pests:

[0324] Larvae of the order Lepidoptera include, but are not limited to, armyworms, cutworms, loopers and heliothines in the family Noctuidae Spodoptera frugiperda J E Smith (fall armyworm); S. exigua Hubner (beet armyworm); S. litura Fabricius (tobacco cutworm, cluster caterpillar); Mamestra configurata Walker (bertha armyworm); M. brassicae Linnaeus (cabbage moth); Agrotis Ipsilon Hufnagel (black cutworm); A. orthogonia Morrison (western cutworm); A. subterranea Fabricius (granulate cutworm); Alabama argillacea Hubner (cotton leaf worm); Trichoplusia ni Hubner (cabbage looper); Pseudoplusia includens Walker (soybean looper); Anticarsia gemmatalis Hubner (velvet bean caterpillar); Hypena scabra Fabricius (green clover worm); Heliothis virescens Fabricius (tobacco budworm); Pseudaletia umpuncta Haworth (armyworm); Athetis mindara Barnes and Mcdunnough (rough skinned cutworm); Euxoa messoria Harris (darksided cutworm); Earias insulana Boisduval (spiny bollworm); E. vittella Fabricius (spotted bollworm); Helicoverpa armigera Hubner (American bollworm); H. zea Boddie (corn earworm or cotton bollworm); Melanchra picta Harris (zebra caterpillar); Egira (Xylomyges) curialis Grote (citrus cutworm); borers, case bearers, webworms, coneworms, and skeletonizers from the family Pyralidae Ostrinia nubilalis Hubner (European corn borer); Amyelois transitella Walker (naval orangeworm); Anagasta kuehniella Zeller (Mediterranean flour moth); Cadra cautella Walker (almond moth); Chilo suppressalis Walker (rice stem borer); C. partellus, (sorghum borer); Corcyra cephalonica Stainton (rice moth); Crambus caliginosellus Clemens (corn root webworm); C. teterrellus Zincken (bluegrass webworm); Cnaphalocrocis medinalis Guenee (rice leaf roller); Desmia funeralis Hubner (grape leaffolder); Diaphania hyalinata Linnaeus (melon worm); D. nitidalis Stoll (pickleworm); Diatraea grandiosella Dyar (southwestern corn borer), D. saccharalis Fabricius (surgarcane borer); Eoreuma loftini Dyar (Mexican rice borer); Ephestia elutella Hubner (tobacco (cacao) moth); Galleria mellonella Linnaeus (greater wax moth); Herpetogramma licarsisalis Walker (sod webworm); Homoeosoma electellum Hulst (sunflower moth); Elasmopalpus lignosellus Zeller (lesser cornstalk borer); Achroia grisella Fabricius (lesser wax moth); Loxostege sticticalis Linnaeus (beet webworm); Orthaga thyrisalis Walker (tea tree web moth); Maruca testulalis Geyer (bean pod borer); Plodia interpunctella Hubner (Indian meal moth); Scirpophaga incertulas Walker (yellow stem borer); Udea rubigalis Guenee (celery leaftier); and leafrollers, budworms, seed worms and fruit worms in the family Tortricidae Acleris gloverana Walsingham (Western blackheaded budworm); A. variana Fernald (Eastern blackheaded budworm); Archips argyrospila Walker (fruit tree leaf roller); A. rosana Linnaeus (European leaf roller); and other Archips species, Adoxophyes orana Fischer von Rosslerstamm (summer fruit tortrix moth); Cochylis hospes Walsingham (banded sunflower moth); Cydia latiferreana Walsingham (filbertworm); C. pomonella Linnaeus (colding moth); Platynota flavedana Clemens (variegated leafroller); P. stultana Walsingham (omnivorous leafroller); Lobesia botrana Denis & Schiffermuller (European grape vine moth); Spilonota ocellana Denis & Schiffermuller (eyespotted bud moth); Endopiza viteana Clemens (grape berry moth); Eupoecilia ambiguella Hubner (vine moth); Bonagota salubricola Meyrick (Brazilian apple leafroller); Grapholita molesta Busck (oriental fruit moth); Suleima helianthana Riley (sunflower bud moth); Argyrotaenia spp.; Choristoneura spp.

[0325] Selected other agronomic pests in the order Lepidoptera include, but are not limited to, Alsophila pometaria Harris (fall cankerworm); Anarsia lineatella Zeller (peach twig borer); Anisota senatoria J. E. Smith (orange striped oakworm); Antheraea pernyi Guerin-Meneville (Chinese Oak Tussah Moth); Bombyx mori Linnaeus (Silkworm); Bucculatrix thurberiella Busck (cotton leaf perforator); Collas eurytheme Boisduval (alfalfa caterpillar); Datana integerrima Grote & Robinson (walnut caterpillar); Dendrolimus sibiricus Tschetwerikov (Siberian silk moth), Ennomos subsignaria Hubner (elm spanworm); Erannis tiliaria Harris (linden looper); Euproctis chrysorrhoea Linnaeus (browntail moth); Harrisina americana Guerin-Meneville (grapeleaf skeletonizer); Hemileuca oliviae Cockrell (range caterpillar); Hyphantria cunea Drury (fall web-worm); Keiferia lycopersicella Walsingham (tomato pinworm); Lambdina fiscellaria Hulst (Eastern hemlock looper); L. fiscellaria lugubrosa Hulst (Western hemlock looper); Leucoma salicis Linnaeus (satin moth); Lymantria dispar Linnaeus (gypsy moth); Manduca quinquemaculata Haworth (five spotted hawk moth, tomato hornworm); M. sexta Haworth (tomato homworm, tobacco hornworm); Operophtera brumata Linnaeus (winter moth); Paleacrita vernata Peck (spring cankerworm); Papilio cresphontes Cramer (giant swallowtail orange dog); Phryganidia californica Packard (California oakworm); Phyllocnistis citrella Stainton (citrus leafminer); Phyllonorycter blancardella Fabricius (spotted tentiform leafminer); Pieris brassicae Linnaeus (large white butterfly); P. rapae Linnaeus (small white butterfly); P. napi Linnaeus (green veined white butterfly); Platyptilia carduidactyla Riley (artichoke plume moth); Plutella xylostella Linnaeus (diamondback moth); Pectinophora gossypiella Saunders (pink bollworm); Pontia protodice Boisduval and Leconte (Southern cabbage-worm); Sabulodes aegrotata Guenee (onmivorous looper); Schizura concinna J. E. Smith (red humped caterpillar); Sitotroga cerealella Olivier (Angoumois grain moth); Thaumetopoea pityocampa Schiffermuller (pine processionary caterpillar); Tineola bisselliella Hummel (webbing clothes moth); Tuta absoluta Meyrick (tomato leafminer); Yponomeuta padella Linnaeus (ermine moth); Heliothis subflexa Guenee; Malacosoma spp. and Orgyia spp.; Ostrinia nubilalis (European corn borer); seed corn maggot; Agrotis ipsilon (black cutworm).

[0326] Larvae and adults of the order Coleoptera including weevils from the families Anthribidae, Bruchidae and Curculionidae (including, but not limited to: Anthonomus grandis Boheman (boll weevil); Lissorhoptrus oryzophilus Kuschel (rice water weevil); Sitophilus granarius Linnaeus (granary weevil); S. oryzae Linnaeus (rice weevil); Hypera punctata Fabricius (clover leaf weevil); Cylindrocopturus adspersus LeConte (sunflower stem weevil); Smicronyx fulvus LeConte (red sunflower seed weevil); S. sordidus LeConte (gray sunflower seed weevil); Sphenophorus maidis Chittenden (maize billbug)); flea beetles, cucumber beetles, rootworms, leaf beetles, potato beetles and leafminers in the family Chrysomelidae (including, but not limited to: Leptinotarsa decemlineata Say (Colorado potato beetle); Diabrotica virgifera LeConte (western corn rootworm); D. barberi Smith and Lawrence (northern corn rootworm); D. undecimpunctata howardi Barber (southern corn rootworm); Chaetocnema pulicaria Melsheimer (corn flea beetle); Phyllotreta cruciferae Goeze (Crucifer flea beetle); Phyllotreta striolata (stripped flea beetle); Colaspis brunnea Fabricius (grape colaspis); Oulema melanopus Linnaeus (cereal leaf beetle); Zygogramma exclamationis Fabricius (sunflower beetle)); beetles from the family Coccinellidae (including, but not limited to: Epilachna varivestis Mulsant (Mexican bean beetle)); chafers and other beetles from the family Scarabaeidae (including, but not limited to: Popillia japonica Newman (Japanese beetle); Cyclocephala borealis Arrow (northern masked chafer, white grub); C. immaculata Olivier (southern masked chafer, white grub); Rhizotrogus majalis Razoumowsky (European chafer); Phyllophaga crinita Burmeister (white grub); Ligyrus gibbosus De Geer (carrot beetle)); carpet beetles from the family Dermestidae; wireworms from the family Elateridae, Eleodes spp., Melanotus spp.; Conoderus spp.; Limonius spp.; Agriotes spp.; Ctenicera spp.; Aeolus spp.; bark beetles from the family Scolytidae and beetles from the family Tenebrionidae; Cerotoma trifurcate (bean leaf beetle); and wireworm.

[0327] Adults and immatures of the order Diptera, including leafminers Agromyza parvicornis Loew (corn blotch leafminer); midges (including, but not limited to: Contarinia sorghicola Coquillett (sorghum midge); Mayetiola destructor Say (Hessian fly); Sitodiplosis mosellana Gehin (wheat midge); Neolasioptera murtfeldtiana Felt, (sunflower seed midge)); fruit flies (Tephritidae), Oscinella frit Linnaeus (fruit flies); maggots (including, but not limited to: Delia platura Meigen (seedcorn maggot); D. coarctata Fallen (wheat bulb fly) and other Delia spp., Meromyza americana Fitch (wheat stem maggot); Musca domestica Linnaeus (house flies); Fannia canicularis Linnaeus, F. femoralis Stein (lesser house flies); Stomoxys calcitrans Linnaeus (stable flies)); face flies, horn flies, blow flies, Chrysomya spp.; Phormia spp. and other muscoid fly pests, horse flies Tabanus spp.; bot flies Gastrophilus spp.; Oestrus spp.; cattle grubs Hypoderma spp.; deer flies Chrysops spp.; Melophagus ovinus Linnaeus (keds) and other Brachycera, mosquitoes Aedes spp.; Anopheles spp.; Culex spp.; black flies Prosimulium spp.; Simulium spp.; biting midges, sand flies, sciarids, and other Nematocera.

[0328] Adults and nymphs of the orders Hemiptera and Homoptera such as, but not limited to, adelgids from the family Adelgidae, plant bugs from the family Miridae, cicadas from the family Cicadidae, leafhoppers, Empoasca spp.; from the family Cicadellidae, planthoppers from the families Cixiidae, Flatidae, Fulgoroidea, Issidae and Delphacidae, treehoppers from the family Membracidae, psyllids from the family Psyllidae, whiteflies from the family Aleyrodidae, aphids from the family Aphididae, phylloxera from the family Phylloxeridae, mealybugs from the family Pseudococcidae, scales from the families Asterolecanidae, Coccidae, Dactylopiidae, Diaspididae, Eriococcidae Ortheziidae, Phoenicococcidae and Margarodidae, lace bugs from the family Tingidae, stink bugs from the family Pentatomidae, cinch bugs, Blissus spp.; and other seed bugs from the family Lygaeidae, spittlebugs from the family Cercopidae squash bugs from the family Coreidae and red bugs and cotton stainers from the family Pyrrhocoridae.

[0329] Agronomically important members from the order Homoptera further include, but are not limited to: Acyrthisiphon pisum Harris (pea aphid); Aphis craccivora Koch (cowpea aphid); A. fabae Scopoli (black bean aphid); A. gossypii Glover (cotton aphid, melon aphid); A. maidiradicis Forbes (corn root aphid); A. pomi De Geer (apple aphid); A. spiraecola Patch (spirea aphid); Aulacorthum solani Kaltenbach (foxglove aphid); Chaetosiphon fragaefolii Cockerell (strawberry aphid); Diuraphis noxia Kurdjumov/Mordvilko (Russian wheat aphid); Dysaphis plantaginea Paaserini (rosy apple aphid); Eriosoma lanigerum Hausmann (woolly apple aphid); Brevicoryne brassicae Linnaeus (cabbage aphid); Hyalopterus pruni Geoffroy (mealy plum aphid); Lipaphis erysimi Kaltenbach (turnip aphid); Metopolophium dirrhodum Walker (cereal aphid); Macrosiphum euphorbiae Thomas (potato aphid); Myzus persicae Sulzer (peach potato aphid, green peach aphid); Nasonovia ribisnigri Mosley (lettuce aphid); Pemphigus spp. (root aphids and gall aphids); Rhopalosiphum maidis Fitch (corn leaf aphid); R. padi Linnaeus (bird cherry-oat aphid); Schizaphis graminum Rondani (greenbug); Sipha flava Forbes (yellow sugarcane aphid); Sitobion avenae Fabricius (English grain aphid); Therioaphis maculata Buckton (spotted alfalfa aphid); Toxoptera aurantii Boyer de Fonscolombe (black citrus aphid) and T. citricida Kirkaldy (brown citrus aphid); Melanaphis sacchari (sugarcane aphid); Adelges spp. (adelgids); Phylloxera devastatrix Pergande (pecan phylloxera); Bemisia tabaci Gennadius (tobacco whitefly, sweetpotato whitefly); B. argentifolii Bellows & Perring (silverleaf whitefly); Dialeurodes citri Ashmead (citrus whitefly); Trialeurodes abutiloneus (bandedwinged whitefly) and T. vaporariorum Westwood (greenhouse whitefly); Empoasca fabae Harris (potato leafhopper); Laodelphax striatellus Fallen (smaller brown planthopper); Macrolestes quadrilineatus Forbes (aster leafhopper); Nephotettix cinticeps Uhler (green leafhopper); N. nigropictus Stal (rice leafhopper); Nilaparvata lugens Stal (brown planthopper); Peregrinus maidis Ashmead (corn planthopper); Sogatella furcifera Horvath (white backed planthopper); Sogatodes orizicola Muir (rice delphacid); Typhlocyba pomaria McAtee (white apple leafhopper); Erythroneoura spp. (grape leafhoppers); Magicicada septendecim Linnaeus (periodical cicada); Icerya purchasi Maskell (cottony cushion scale); Quadraspidiotus perniciosus Comstock (San Jose scale); Planococcus citri Risso (citrus mealybug); Pseudococcus spp. (other mealybug complex); Cacopsylla pyricola Foerster (pear psylla); Trioza diospyri Ashmead (persimmon psylla).

[0330] Species from the order Hemiptera include, but are not limited to: Acrosternum hilare Say (green stink bug); Anasa tristis De Geer (squash bug); Blissus leucopterus Say (chinch bug); Corythuca gossypii Fabricius (cotton lace bug); Cyrtopeltis modesta Distant (tomato bug); Dysdercus suturellus Herrich-Schaffer (cotton stainer); Euschistus servus Say (brown stink bug); E. variolarius Palisot de Beauvais (one spotted stink bug); Graptostethus spp. (complex of seed bugs); Leptoglossus corculus Say (leaf footed pine seed bug); Lygus lineolaris Palisot de Beauvais (tarnished plant bug); L. Hesperus Knight (Western tarnished plant bug); L. pratensis Linnaeus (common meadow bug); L. rugulipennis Poppius (European tarnished plant bug); Lygocoris pabulinus Linnaeus (common green capsid); Nezara viridula Linnaeus (southern green stink bug); Oebalus pugnax Fabricius (rice stink bug); Oncopeltus fasciatus Dallas (large milk-weed bug); Pseudatomoscelis seriatus Reuter (cotton flea hopper).

[0331] Hemiptera such as, Calocoris norvegicus Gmelin (strawberry bug); Orthops campestris Linnaeus; Plesiocoris rugicollis Fallen (apple capsid); Cyrtopeltis modestus Distant (tomato bug); Cyrtopeltis notatus Distant (suckfly); Spanagonicus albofasciatus Reuter (whitemarked fleahopper); Diaphnocoris chlorionis Say (honeylocust plant bug); Labopidicola allii Knight (onion plant bug); Pseudatomoscelis seriatus Reuter (cotton fleahopper); Adelphocoris rapidus Say (rapid plant bug); Poecilocapsus lineatus Fabricius (four lined plant bug); Nysius ericae Schilling (false chinch bug); Nysius raphanus Howard (false chinch bug); Nezara viridula Linnaeus (Southern green stink bug); Eurygaster spp.; Coreidae spp.; Pyrrhocoridae spp.; Tinidae spp.; Blostomatidae spp.; Reduviidae spp. and Cimicidae spp.

[0332] Adults and larvae of the order Acari (mites) such as Aceria tosichella Keifer (wheat curl mite); Petrobia latens Muller (brown wheat mite); spider mites and red mites in the family Tetranychidae, Panonychus ulmi Koch (European red mite); Tetranychus urticae Koch (two spotted spider mite); (T. mcdanieli McGregor (McDaniel mite); T. cinnabarinus Boisduval (carmine spider mite); T. turkestani Ugarov & Nikolski (strawberry spider mite); flat mites in the family Tenuipalpidae, Brevipalpus lewisi McGregor (citrus flat mite); rust and bud mites in the family Eriophyidae and other foliar feeding mites and mites important in human and animal health, i.e., dust mites in the family Epidermoptidae, follicle mites in the family Demodicidae, grain mites in the family Glycyphagidae, ticks in the order Ixodidae. Ixodes scapularis Say (deer tick); I. holocyclus Neumann (Australian paralysis tick); Dermacentor variabilis Say (American dog tick); Amblyomma americanum Linnaeus (lone star tick) and scab and itch mites in the families Psoroptidae, Pyemotidae and Sarcoptidae.

[0333] Insect pests of the order Thysanura, such as Lepisma saccharina Linnaeus (silverfish); Thermobia domestica Packard (firebrat).

[0334] Additional arthropod pests include: spiders in the order Araneae such as Loxosceles reclusa Gertsch and Mulaik (brown recluse spider) and the Latrodectus mactans Fabricius (black widow spider) and centipedes in the order Scutigeromorpha such as Scutigera coleoptrata Linnaeus (house centipede).

[0335] Superfamily of stink bugs and other related insects including but not limited to species belonging to the family Pentatomidae (Nezara viridula, Halyomorpha halys, Piezodorus guildini, Euschistus servus, Acrosternum hilare, Euschistus heros, Euschistus tristigmus, Acrosternum hilare, Dichelops furcatus, Dichelops melacanthus, and Bagrada hilaris (Bagrada Bug)), the family Plataspidae (Megacopta cribraria-Bean plataspid) and the family Cydnidae (Scaptocoris castanea-Root stink bug) and Lepidoptera species including but not limited to: diamond-back moth, e.g., Helicoverpa zea Boddie; soybean looper, e.g., Pseudoplusia includens Walker and velvet bean caterpillar e.g., Anticarsia gemmatalis Hubner.

[0336] Nematodes include parasitic nematodes such as root-knot, cyst and lesion nematodes, including Heterodera spp., Meloidogyne spp. and Globodera spp.; particularly members of the cyst nematodes, including, but not limited to, Heterodera glycines (soybean cyst nematode); Heterodera schachtii (beet cyst nematode); Heterodera avenae (cereal cyst nematode) and Globodera rostochiensis and Globodera pailida (potato cyst nematodes). Lesion nematodes include Pratylenchus spp.

### Pesticidal Compositions Comprising a Pesticide and Microbe of the Disclosure

[0337] As aforementioned, agricultural compositions of the disclosure, which may comprise any microbe taught herein, are sometimes combined with one or more pesticides. Pesticides can include herbicides, insecticides, fungicides, nematicides, etc.

[0338] In some embodiments, the pesticides/microbial combinations can be applied in the form of compositions and can be applied to the crop area or plant to be treated, simultaneously or in succession, with other compounds. These compounds can be fertilizers, weed killers, cryoprotectants, surfactants, detergents, pesticidal soaps, dormant oils, polymers, and/or time release or biodegradable carrier formulations that permit long term dosing of a target area following a single application of the formulation. They can also be selective herbicides, chemical insecticides, virucides, microbicides, amoebicides, pesticides, fungicides, bacteriocides, nematicides, molluscicides or mixtures of several of these preparations, if desired, together with further agriculturally acceptable carriers, surfactants or application promoting adjuvants customarily employed in the art of formulation. Suitable carriers (i.e. agriculturally acceptable carriers) and adjuvants can be solid or liquid and correspond to the substances ordinarily employed in formulation technology, e.g. natural or regenerated mineral substances, solvents, dispersants, wetting agents, sticking agents, tackifiers, binders or fertilizers. Likewise, the formulations may be prepared into edible baits or fashioned into pest traps to permit feeding or ingestion by a target pest of the pesticidal formulation.

[0339] Exemplary chemical compositions, which may be combined with the microbes of the disclosure, include:

[0340] Fruits/Vegetables Herbicides: Atrazine, Bromacil, Diuron, Glyphosate, Linuron, Metribuzin, Simazine, Trifluralin, Fluazifop, Glufosinate, Halo sulfuron Gowan, Paraquat, Propyzamide, Sethoxydim, Butafenacil, Halosulfuron, Indaziflam; Fruits/Vegetables Insecticides: Aldicarb, Bacillus thuringiensis, Carbaryl, Carbofuran, Chlorpyrifos, Cypermethrin, Deltamethrin, Diazinon, Malathion, Abamectin, Cyfluthrin/betacyfluthrin, Esfenvalerate, Lambda-cyhalothrin, Acequinocyl, Bifenazate, Methoxyfenozide, Novaluron, Chromafenozide, Thiacloprid, Dinotefuran, FluaCrypyrim, Tolfenpyrad, Clothianidin, Spirodiclofen, Gamma-cyhalothrin, Spiromesifen, Spinosad, Rynaxypyr, Cyazypyr, Spinoteram, Triflumuron, Spirotetramat, Imidacloprid, Flubendiamide, Thiodicarb, Metaflumizone, Sulfoxaflor, Cyflumetofen, Cyanopyrafen, Imidacloprid, Clothianidin, Thiamethoxam, Spinotoram, Thiodicarb, Flonicamid, Methiocarb, Emamectin benzoate, Indoxacarb, Forthiazate, Fenamiphos, Cadusaphos, Pyriproxifen, Fenbutatin oxide, Hexthiazox, Methomyl, 4-[[(6-Chlorpyridin-3-yl)methyl](2,2-difluorethyl)amino]furan-2(5H)-on; Fruits Vegetables Fungicides: Carbendazim, Chlorothalonil, EBDCs, Sulphur, Thiophanate-methyl, Azoxystrobin, Cymoxanil, Fluazinam, Fosetyl, Iprodione, Kresoxim-methyl, Metalaxyl/mefenoxam, Trifloxystrobin, Ethaboxam, Iprovalicarb, Trifloxystrobin, Fenhexamid, Oxpoconazole fumarate, Cyazofamid, Fenamidone, Zoxamide, Picoxystrobin, Pyraclostrobin, Cyflufenamid, Boscalid;

[0341] Cereals Herbicides: Isoproturon, Bromoxynil, Ioxynil, Phenoxies, Chlorsulfuron, Clodinafop, Diclofop, Diflufenican, Fenoxaprop, Florasulam, Fluoroxypyr, Metsulfuron, Triasulfuron, Flucarbazone, Iodosulfuron, Propoxycarbazone, Picolin-afen, Mesosulfuron, Beflubutamid, Pinoxaden, Amidosulfuron, Thifensulfuron Methyl, Tribenuron, Flupyrsulfuron, Sulfosulfuron, Pyrasulfotole, Pyroxsulam, Flufenacet, Tralkoxydim, Pyroxasulfon; Cereals Fungicides: Carbendazim, Chlorothalonil, Azoxystrobin, Cyproconazole, Cyprodinil, Fenpropimorph, Epoxiconazole, Kresoxim-methyl, Quinoxyfen, Tebuconazole, Trifloxystrobin, Simeconazole, Picoxystrobin, Pyraclostrobin, Dimoxystrobin, Prothioconazole, Fluoxastrobin; Cereals Insecticides: Dimethoate, Lambda-cyhalothrin, Deltamethrin, alpha-Cypermethrin, β-cyfluthrin, Bifenthrin, Imidacloprid, Clothianidin, Thiamethoxam, Thiacloprid, Acetamiprid, Dinetofuran, Clorphyriphos, Metamidophos, Oxidemethon methyl, Pirimicarb, Methiocarb;

[0342] Maize Herbicides: Atrazine, Alachlor, Bromoxynil, Acetochlor, Dicamba, Clopyralid, S-Dimethenamid, Glufosinate, Glyphosate, Isoxaflutole, S-Metolachlor, Mesotrione, Nicosulfuron, Primisulfuron, Rimsulfuron, Sulcotrione, Foramsulfuron, Topramezone, Tembotrione, Saflufenacil, Thiencarbazone, Flufenacet, Pyroxasulfon; Maize Insecticides: Carbofuran, Chlorpyrifos, Bifenthrin, Fipronil, Imidacloprid, Lambda-Cyhalothrin, Tefluthrin, Terbufos, Thiamethoxam, Clothianidin, Spiromesifen, Flubendiamide, Triflumuron, Rynaxypyr, Deltamethrin, Thiodicarb, β-Cyfluthrin, Cypermethrin, Bifenthrin, Lufenuron, Triflumoron, Tefluthrin, Tebupirim-phos, Ethiprole, Cyazypyr, Thiacloprid, Acetamiprid, Dinetofuran, Avermectin, Methiocarb, Spirodiclofen, Spirotetramat; Maize Fungicides: Fenitropan, Thiram, Prothioconazole, Tebuconazole, Trifloxystrobin;

[0343] Rice Herbicides: Butachlor, Propanil, Azimsulfuron, Bensulfuron, Cyhalo-fop, Daimuron, Fentrazamide, Imazosulfuron, Mefenacet, Oxaziclomefone, Pyrazosulfuron, Pyributicarb, Quinclorac, Thiobencarb, Indanofan, Flufenacet, Fentrazamide, Halosulfuron, Oxaziclomefone, Benzobicyclon, Pyriftalid, Penoxsulam, Bispyribac, Oxadiargyl, Ethoxysulfuron, Pretilachlor, Mesotrione, Tefuryltrione, Oxadiazone, Fenoxaprop, Pyrimisulfan; Rice Insecticides: Diazinon, Fenitro-thion, Fenobucarb, Monocrotophos, Benfuracarb, Buprofezin, Dinotefuran, Fipronil, Imidacloprid, Isoprocarb, Thiacloprid, Chromafenozide, Thiacloprid, Dinotefuran, Clothianidin, Ethiprole, Flubendiamide, Rynaxypyr, Deltamethrin, Acetamiprid, Thiamethoxam, Cyazypyr, Spinosad, Spinotoram, Emamectin-Benzoate, Cypermethrin, Chlorpyriphos, Cartap, Methamidophos, Etofen-prox, Triazophos, 4-[[(6-Chlorpyridin-3-yl)methyl](2,2-difluorethyl)amino]furan-2(5H)-on, Carbofuran, Benfuracarb; Rice Fungicides: Thiophanate-methyl, Azoxystrobin, Carpropamid, Edifenphos, Ferimzone, Iprobenfos, Isoprothiolane, Pencycuron, Probenazole, Pyroquilon, Tricyclazole, Trifloxystrobin, Diclocymet, Fenoxanil, Simeconazole, Tiadinil;

[0344] Cotton Herbicides: Diuron, Fluometuron, MSMA, Oxyfluorfen, Prometryn, Trifluralin, Carfentrazone, Clethodim, Fluazifop-butyl, Glyphosate, Norflurazon, Pendimethalin, Pyrithiobac-sodium, Trifloxysulfuron, Tepraloxydim, Glufosinate, Flumioxazin, Thidiazuron; Cotton Insecticides: Acephate, Aldicarb, Chlorpyrifos, Cypermethrin, Deltamethrin, Malathion, Monocrotophos, Abamectin, Acetamiprid, Emamectin Benzoate, Imidacloprid, Indoxacarb, Lambda-Cyhalothrin, Spinosad, Thiodicarb, Gamma-Cyhalothrin, Spiromesifen, Pyridalyl, Flonicamid, Flubendiamide, Triflumuron, Rynaxypyr, Beta-Cyfluthrin, Spirotetramat, Clothianidin, Thiamethoxam, Thiacloprid, Dinetofuran, Flubendiamide, Cyazypyr, Spinosad, Spinotoram, gamma Cyhalothrin, 4-[[(6-Chlorpyridin-3-yl) methyl](2,2-difluorethyl)amino]furan-2(5H)-on, Thiodicarb, Avermectin, Flonicamid, Pyridalyl, Spiromesifen, Sulfoxaflor, Profenophos, Thriazophos, Endosulfan; Cotton Fungicides: Etridiazole, Metalaxyl, Quintozene;

[0345] Soybean Herbicides: Alachlor, Bentazone, Trifluralin, Chlorimuron-Ethyl, Cloransulam-Methyl, Fenoxaprop, Fomesafen, Flu-azifop, Glyphosate, Imazamox, Imazaquin, Imazethapyr, (S-)Metolachlor, Metribuzin, Pendimethalin, Tepraloxydim, Glufosinate; Soybean Insecticides: Lambda-cyhalothrin, Methomyl, Parathion, Thiocarb, Imidacloprid, Clothianidin, Thiamethoxam, Thiacloprid, Acetamiprid, Dinetofuran, Flubendiamide, Rynaxypyr, Cyazypyr, Spinosad, Spinotoram, Emamectin-Benzoate, Fipronil, Ethiprole, Deltamethrin, β-Cyfluthrin, gamma and lambda Cyhalothrin, 4-[[(6-Chlorpyridin-3-yl) methyl](2,2-difluorethyl)amino]furan-2(5H)-on, Spirotetramat, Spinodiclofen, Triflumuron, Flonicamid, Thiodicarb, beta-Cyfluthrin; Soybean Fungicides: Azoxystrobin, Cyproconazole, Epoxiconazole, Flutriafol, Pyraclostrobin, Tebuconazole, Trifloxystrobin, Prothioconazole, Tetraconazole;

[0346] Sugarbeet Herbicides: Chloridazon, Desmedipham, Ethofumesate, Phenmedipham, Triallate, Clopyralid, Fluazifop, Lenacil, Metamitron, Quinmerac, Cycloxydim, Triflusulfuron, Tepral-oxydim, Quizalofop; Sugarbeet Insecticides: Imidacloprid, Clothianidin, Thiamethoxam, Thiacloprid, Acetamiprid, Dinetofuran, Deltamethrin, β-Cyfluthrin, gamma/lambda Cyhalothrin, 4-[[(6-Chlorpyridin-3-yl)methyl](2,2-difluor-ethyl)amino]furan-2(5H)-on, Tefluthrin, Rynaxypyr, Cyaxypyr, Fipronil, Carbofuran;

[0347] Canola Herbicides: Clopyralid, Diclofop, Fluazifop, Glufosinate, Glyphosate, Metazachlor, Trifluralin Ethametsulfuron, Quinmerac, Quizalofop, Clethodim, Tepraloxydim; Canola Fungicides: Azoxystrobin, Carbendazim, Fludioxonil, Iprodione, Prochloraz, Vinclozolin; Canola Insecticides: Carbofuran organophos-phates, Pyrethroids, Thiacloprid, Deltamethrin, Imidacloprid, Clothianidin, Thiamethoxam, Acetamiprid, Dineto-furan, β-Cyfluthrin, gamma and lambda Cyhalothrin, tau-Fluvaleriate, Ethiprole, Spinosad, Spinotoram, Flubendiamide, Rynaxypyr, Cyazypyr, 4-[[(6-Chlorpyridin-3-yl)methyl](2,2-difluorethyl)amino]furan-2(5H)-on.

### Insecticidal Compositions Comprising an Insecticide and Microbe of the Disclosure

[0348] As aforementioned, agricultural compositions of the disclosure, which may comprise any microbe taught herein, are sometimes combined with one or more insecticides.

[0349] In some embodiments, insecticidal compositions may be included in the compositions set forth herein, and can be applied to a plant(s) or a part(s) thereof simultaneously or in succession, with other compounds. Insecticides include ammonium carbonate, aqueous potassium silicate, boric acid, copper sulfate, elemental sulfur, lime sulfur, sucrose octanoate esters, 4-[[(6-Chlorpyridin-3-yl)methyl](2,2-difluorethyl)amino]furan-2(5H)-on, abamectin, notenone, fenazaquin, fenpyroximate, pyridaben, pyrimedifen, tebufenpyrad, tolfenpyrad, acephate, emamectin benzoate, lepimectin, milbemectin, hdroprene, kinoprene, methoprene, fenoxycarb, pyriproxyfen, methryl bromide and other alkyl halides, fulfuryl fluoride, chloropicrin, borax, disodium octaborate, sodium borate, sodium metaborate, tartar emetic, dazomet, metam, pymetrozine, pyrifluquinazon, flofentezine, diflovidazin, hexythiazox, bifenazate, thiamethoxam, imidacloprid, fenpyroximate, azadirachtin, permethrin, esfenvalerate, acetamiprid, bifenthrin, indoxacarb, azadirachtin, pyrethrin, imidacloprid, beta-cyfluthrin, sulfotep, tebupirimfos, temephos, terbufos, tetrachlorvinphos, thiometon, triazophos, alanycarb, aldicarb, bendiocarb, benfluracarb, butocarboxim, butoxycarboxim, carbaryl, carbofuran, carbosulfan, ethiofencarb, fenobucarb, formetanate, furathiocarb, isoprocarb, methiocarb, methymyl, metolcarb, oxamyl, primicarb, propoxur, thiodicarb, thiofanox, triazamate, trimethacarb, XMC, xylylcarb, acephate, azamethiphos, azinphos-ethyl, azinphos-methyl, cadusafos, chlorethoxyfox, trichlorfon, vamidothion, chlordane, endosulfan, ethiprole, fipronil, acrinathrin, allethrin, bifenthrin, bioallethrin, bioalletherin X-cyclopentenyl, bioresmethrin, cyclorothrin, cyfluthrin, cyhalothrin, cypermethrin, cyphenothrin [(1R)-trans-isomers], deltamethrin, empenthrin [(EZ)-(1R)-isomers], esfenvalerate, etofenprox, fenpropathrin, fenvalerate, flucythrinate, flumethrin, halfenprox, kadathrin, phenothrin [(1R)-trans-isomer] prallethrin, pyrethrins (pyrethrum), resmethrin, silafluofen, tefluthrin, tetramethrin, tetramethrin [(1R)-isomers], tralomethrin, transfluthrin, alpha-cypermethrin, beta-cyfluthrin, beta-cypermethrin, d-cis-trans allethrin, d-trans allethrin, gamma-cyhalothrin, lamda-cyhalothrin, tau-fluvalinate, theta-cypermethrin, zeta-cypermethrin, methoxychlor, nicotine, sulfoxaflor, acetamiprid, clothianidin, dinotefuran, imidacloprid, nitenpyram, thiacloprid, thiamethoxan, tebuprimphos, beta-cyfluthrin, clothianidin, flonicamid, hydramethylnon, amitraz, flubendiamide, blorantraniliprole, lambda cyhalothrin, spinosad, gamma cyhalothrin, Beauveria bassiana, capsicum oleoresin extract, garlic oil, carbaryl, chlorpyrifos, sulfoxaflor, lambda cyhalothrin, Chlorfenvinphos, Chlormephos, Chlorpyrifos, Chlorpyrifos-methyl, Coumaphos, Cyanophos, Demeton-S-methyl, Diazinon, Dichlorvos/DDVP, Dicrotophos, Dimethoate, Dimethylvinphos, Disulfoton, EPN, Ethion, Ethoprophos, Famphur, Fenamiphos, Fenitrothion, Fenthion, Fosthiazate, Heptenophos, Imicyafos, Isofenphos, Isopropyl O-(methoxyaminothio-phosphoryl) salicylate, Isoxathion, Malathion, Mecarbam, Methamidophos, Methidathion, Mevinphos, Monocrotophos, Naled, Omethoate, Oxydemeton-methyl, Parathion, Parathion-methyl, Phenthoate, Phorate, Phosalone, Phosmet, Phosphamidon, Phoxim, Pirimiphos-methyl, Profenofos, Propetamphos, Prothiofos, Pyraclofos, Pyridaphenthion, Quinalphosfluacrypyrim, tebufenozide, chlorantraniliprole, Bacillus thuringiensis subs. Kurstaki, terbufos, mineral oil, fenpropathrin, metaldehyde, deltamethrin, diazinon, dimethoate, diflubenzuron, pyriproxyfen, reosemary oil, peppermint oil, geraniol, azadirachtin, piperonyl butoxide, cyantraniliprole, alpha cypermethrin, tefluthrin, pymetrozine, malathion, Bacillus thuringiensis subsp. israelensis, dicofol, bromopropylate, benzoximate, azadirachtin, flonicamid, soybean oil, Chromobacterium subtsugae strain PRAA4-1, zeta cypermethrin, phosmet, methoxyfenozide, paraffinic oil, spirotetramat, methomyl, Metarhizium anisopliae strain F52, ethoprop, tetradifon, propargite, fenbutatin oxide, azocyclotin, cyhexatin, diafenthiuron, Bacillus sphaericus, etoxazole, flupyradifurone, azadirachtin, Beauveria bassiana, cyflumetofen, azadirachtin, chinomethionat, acephate, Isaria fumosorosea Apopka strain 97, sodium tetraborohydrate decahydrate, emamectin benzoate, cryolite, spinetoram, Chenopodium ambrosioides extract, novaluron, dinotefuran, carbaryl, acequinocyl, flupyradifurone, iron phosphate, kaolin, buprofezin, cyromazine, chromafenozide, halofenozide, methoxyfenozide, tebufenozide, bistrifluron, chlorfluazuron, diflubenzuron, flucycloxuron, flufenoxuron, hexaflumuron, lufenuron, nocaluron, noviflumuron, teflubenzuron, triflumuron, bensultap, cartap hydrochloride, thiocyclam, thiosultap-sodium, DNOC, chlorfenapyr, sulfuramid, phorate, tolfenpyrad, sulfoxaflor, neem oil, Bacillus thuringiensis subsp. tenebrionis strain SA-10, cyromazine, heat-killed Burkholderia spp., cyantraniliprole, cyenopyrafen, cyflumetofen, sodium cyanide, potassium cyanide, calcium cyanide, aluminum phosphide, calcium phosphide, phosphine, zinc phosphide, spriodiclofen, spiromesifen, spirotetramat, metaflumizone, flubendiamide, pyflubumide, oxamyl, Bacillus thuringiensis subsp. aizawai, etoxazole, and esfenvalerate

TABLE 9
Exemplary insecticides associated with various modes of action,
which can be combined with microbes of the disclosure

| | | | Physiological |
|---|---|---|---|
| | | Exemplary | function(s) |
| Mode of Action | Compound class | insecticides | affected |
| acetylcholinesterase | carbamates | Alanycarb, Aldicarb, | Nerve and |
| (AChE) inhibitors | | Bendiocarb, Benfuracarb, | muscle |
| | | Butocarboxim, | |
| | | Butoxycarboxim, Carbaryl, | |
| | | Carbofuran, Carbosulfan, | |
| | | Ethiofencarb, Fenobucarb, | |
| | | Formetanate, Furathiocarb, | |
| | | Isoprocarb, Methiocarb, | |
| | | Methomyl, Metolcarb, | |
| | | Oxamyl, Pirimicarb, Propoxur, | |
| | | Thiodicarb, Thiofanox, | |
| | | Triazamate, Trimethacarb, | |
| | | XMC, Xylylcarb | |
| acetylcholinesterase | organophosphates | Acephate, Azamethiphos, | Nerve and |
| (AChE) inhibitors | | Azinphos-ethyl, Azinphos- | muscle |
| | | methyl, Cadusafos, | |
| | | Chlorethoxyfos, | |
| | | Chlorfenvinphos, | |
| | | Chlormephos, Chlorpyrifos, | |
| | | Chlorpyrifos-methyl, | |
| | | Coumaphos, Cyanophos, | |
| | | Demeton-S-methyl, Diazinon, | |
| | | Dichlorvos/DDVP, | |
| | | Dicrotophos, Dimethoate, | |
| | | Dimethylvinphos, Disulfoton, | |
| | | EPN, Ethion, Ethoprophos, | |
| | | Famphur, Fenamiphos, | |
| | | Fenitrothion, Fenthion, | |
| | | Fosthiazate, Heptenophos, | |
| | | Imicyafos, Isofenphos, | |
| | | Isopropyl O- | |
| | | (methoxyaminothio- | |
| | | phosphoryl) salicylate, | |
| | | Isoxathion, Malathion, | |
| | | Mecarbam, Methamidophos, | |
| | | Methidathion, Mevinphos, | |
| | | Monocrotophos, Naled, | |
| | | Omethoate, Oxydemeton- | |
| | | methyl, Parathion, Parathion- | |
| | | methyl, Phenthoate, Phorate, | |
| | | Phosalone, Phosmet, | |
| | | Phosphamidon, Phoxim, | |
| | | Pirimiphos-methyl, | |
| | | Profenofos, Propetamphos, | |
| | | Prothiofos, Pyraclofos, | |
| | | Pyridaphenthion, Quinalphos, | |
| | | Sulfotep, Tebupirimfos, | |
| | | Temephos, Terbufos, | |
| | | Tetrachlorvinphos, Thiometon, | |
| | | Triazophos, Trichlorfon, | |
| | | Vamidothion | |
| GABA-gated | cyclodiene | Chlordane, Endosulfan | Nerve and |
| chloride channel | organochlorines | | muscle |
| blockers | | | |
| GABA-gated | phenylpyrazoles | Ethiprole, Fipronil | Nerve and |
| chloride channel | (Fiproles) | | muscle |
| blockers | | | |
| sodium channel | pyrethroids, | Acrinathrin, Allethrin, | Nerve and |
| modulators | pyrethrins | Bifenthrin, Bioallethrin, | muscle |
| | | Bioallethrin S-cyclopentenyl, | |
| | | Bioresmethrin, Cycloprothrin, | |
| | | Cyfluthrin, Cyhalothrin, | |
| | | Cypermethrin, Cyphenothrin | |
| | | [(1R)-trans-isomers], | |
| | | Deltamethrin, Empenthrin | |
| | | [(EZ)-(1R)-isomers], | |
| | | Esfenvalerate, Etofenprox, | |
| | | Fenpropathrin, Fenvalerate, | |
| | | Flucythrinate, Flumethrin, | |
| | | Halfenprox, Kadathrin, | |
| | | Phenothrin [(1R)-trans- | |
| | | isomer], Prallethrin, Pyrethrins | |
| | | (pyrethrum), Resmethrin, | |
| | | Silafluofen, Tefluthrin, | |
| | | Tetramethrin, Tetramethrin | |
| | | [(1R)-isomers], Tralomethrin, | |
| | | Transfluthrin, alpha- | |
| | | Cypermethrin, beta-Cyfluthrin, | |
| | | beta-Cypermethrin, d-cis-trans | |
| | | Allethrin, d-trans Allethrin, | |
| | | gamma-Cyhalothrin, lambda- | |
| | | Cvhalothrin, tau-Fluvalinate, | |
| | | theta-Cypermethrin, zeta- | |
| | | Cypermethrin | |
| sodium channel | DDT, | DDT, methoxychlor | Nerve and |
| modulators | methoxychlor | | muscle |
| nicotinic | neonicotinoids | Acetamiprid, Clothianidin, | Nerve and |
| acetylcholine | | Dinotefuran, Imidacloprid, | muscle |
| receptor (nAChR) | | Nitenpyram, Thiacloprid, | |
| competitive | | Thiamethoxam | |
| modulators | | | |
| nicotinic | nicotine | nicotine | Nerve and |
| acetylcholine | | | muscle |
| receptor (nAChR) | | | |
| competitive | | | |
| modulators | | | |
| nicotinic | sulfoximines | sulfoxaflor | Nerve and |
| acetylcholine | | | muscle |
| receptor (nAChR) | | | |
| competitive | | | |
| modulators | | | |
| nicotinic | butenolides | Flupyradifurone | Nerve and |
| acetylcholine | | | muscle |
| receptor (nAChR) | | | |
| competitive | | | |
| modulators | | | |
| nicotinic | spinosyns | Spinetoram, Spinosad | Nerve and |
| acetylcholine | | | muscle |
| receptor (nAChR) | | | |
| allosteric | | | |
| modulators | | | |
| Glutamate-gated | avermectins, | Abamectin, Emamectin | Nerve and |
| chloride channel | milbemycins | benzoate, Lepimectin, | muscle |
| (GluCl) allosteric | | Milbemectin | |
| modulators | | | |
| juvenile hormone | juvenile hormone | Hydroprene, Kinoprene, | Growth |
| mimics | analogues | Methoprene | |
| juvenile hormone | Fenoxycarb | Fenoxycarb | Growth |
| mimics | | | |
| juvenile hormone | Pyriproxyfen | Pyriproxyfen | Growth |
| mimics | | | |
| miscellaneous non- | alkyl halides | Methyl bromide and other | Unknown or |
| specific (multi-site) | | alkyl halides | non-specific |
| inhibitors | | | |
| miscellaneous non- | Chloropicrin | Chloropicrin | Unknown or |
| specific (multi-site) | | | non-specific |
| inhibitors | | | |
| miscellaneous non- | fluorides | Cryolite, sulfuryl fluoride | Unknown or |
| specific (multi-site) | | | non-specific |
| inhibitors | | | |
| miscellaneous non- | borates | Borax, Boric acid, Disodium | Unknown or |
| specific (multi-site) | | octaborate, Sodium borate, | non-specific |
| inhibitors | | Sodium metaborate | |
| miscellaneous non- | tartar emetic | tartar emetic | Unknown or |
| specific (multi-site) | | | non-specific |
| inhibitors | | | |
| miscellaneous non- | methyl | Dazomet, Metam | Unknown or |
| specific (multi-site) | isothiocyanate | | non-specific |
| inhibitors | generators | | |
| modulators of | Pyridine | Pymetrozine, Pyrifluquinazon | Nerve and |
| chordotonal organs | azomethine | | muscle |
| | derivatives | | |
| mite growth | Clofentezine, | Clofentezine, Diflovidazin, | Growth |
| inhibitors | Diflovidazin, | Hexythiazox | |
| | Hexythiazox | | |
| mite growth | Etoxazole | Etoxazole | Growth |
| inhibitors | | | |
| microbial | Bacillus | Bt var. aizawai, Bt var. | Midgut |
| disruptors of insect | thuringiensis and | israelensis, Bt var. kurstaki, Bt | |
| midgut membranes | the insecticidal | var. tenebrionensis | |
| | proteins they | | |
| | produce | | |
| microbial | Bacillus | Bacillus sphaericus | Midgut |
| disruptors of insect | sphaericus | | |
| midgut membranes | | | |
| inhibitors of | Diafenthiuron | Diafenthiuron | Respiration |
| mitochondrial ATP | | | |
| synthase | | | |
| inhibitors of | organotin | Azocyclotin, Cyhexatin, | Respiration |
| mitochondrial ATP | miticides | Fenbutatin oxide | |
| synthase | | | |
| inhibitors of | Propargite | Propargite | Respiration |
| mitochondrial ATP | | | |
| synthase | | | |
| inhibitors of | Tetradifon | Tetradifon | Respiration |
| mitochondrial ATP | | | |
| synthase | | | |
| uncouplers of | Chlorfenapyr, | Chlorfenapyr, DNOC, | Respiration |
| oxidative | DNOC, | Sulfuramid | |
| phosphorylation via | Sulfuramid | | |
| disruption of the | | | |
| proton gradient | | | |
| Nicotinic | nereistoxin | Bensultap, Cartap | Nerve and |
| acetylcholine | analogues | hydrochloride, Thiocyclam, | muscle |
| receptor (nAChR) | | Thiosultap-sodium | |
| channel blockers | | | |
| inhibitors of chitin | benzoylureas | Bistrifluron, Chlorfluazuron, | Growth |
| biosynthesis, type 0 | | Diflubenzuron, Flucycloxuron, | |
| | | Flufenoxuron, Hexaflumuron, | |
| | | Lufenuron, Novaluron, | |
| | | Noviflumuron, Teflubenzuron, | |
| | | Triflumuron | |
| inhibitors of chitin | Buprofezin | Buprofezin | Growth |
| biosynthesis, type 1 | | | |
| moulting disruptor, | Cyromazine | Cyromazine | Growth |
| Dipteran | | | |
| ecdysone receptor | diacylhydrazines | Chromafenozide, | Growth |
| agonists | | Halofenozide, | |
| | | Methoxyfenozide, | |
| | | Tebufenozide | |
| octopamine | Amitraz | Amitraz | Nerve and |
| receptor agonists | | | muscle |
| mitochondrial | Hydramethylnon | Hydramethylnon | Respiration |
| complex III | | | |
| electron transport | | | |
| inhibitors | | | |
| mitochondrial | Acequinocyl | Acequinocyl | Respiration |
| complex III | | | |
| electron transport | | | |
| inhibitors | | | |
| mitochondrial | Fluacrypyrim | Fluacrypyrim | Respiration |
| complex III | | | |
| electron transport | | | |
| inhibitors | | | |
| mitochondrial | Bifenazate | Bifenazate | Respiration |
| complex III | | | |
| electron transport | | | |
| inhibitors | | | |
| mitochondrial | Meti acaricides | Fenazaquin, Fenpyroximate, | Respiration |
| complex I electron | and insecticides | Pyridaben, Pyrimidifen, | |
| transport inhibitors | | Tebufenpyrad, Tolfenpyrad | |
| mitochondrial | Rotenone | Rotenone | Respiration |
| complex I electron | | | |
| transport inhibitors | | | |
| voltage-dependent | oxadiazines | Indoxacarb | Nerve and |
| sodium channel | | | muscle |
| blockers | | | |
| voltage-dependent | semicarbazones | Metaflumizone | Nerve and |
| sodium channel | | | muscle |
| blockers | | | |
| inhibitors of acetyl | tetronic and | Spirodiclofen, Spiromesifen, | Growth |
| CoA carboxylase | tetramic acid | Spirotetramat | |
| | derivatives | | |
| mitochondrial | phosphides | Aluminium phosphide, | Respiration |
| complex IV | | Calcium phosphide, | |
| electron transport | | Phosphine, Zinc phosphide | |
| inhibitors | | | |
| mitochondrial | cyanides | Calcium cyanide, | Respiration |
| complex IV | | Potassium cyanide, | |
| electron transport | | Sodium cyanide | |
| inhibitors | | | |
| mitochondrial | beta-ketonitrile | Cyenopyrafen, Cyflumetofen | Respiration |
| complex II electron | derivatives | | |
| transport inhibitors | | | |
| mitochondrial | carboxanilides | Pyflubumide | Respiration |
| complex II electron | | | |
| transport inhibitors | | | |
| ryanodine receptor | diamides | Chlorantraniliprole, | Nerve and |
| modulators | | Cyantraniliprole, | muscle |
| | | Flubendiamide | |
| Chordotonal organ | Flonicamid | Flonicamid | Nerve and |
| modulators - | | | muscle |
| undefined target | | | |
| site | | | |
| compounds of | Azadirachtin | Azadirachtin | Unknown |
| unknown or | | | |
| uncertain mode of | | | |
| action | | | |
| compounds of | Benzoximate | Benzoximate | Unknown |
| unknown or | | | |
| uncertain mode of | | | |
| action | | | |
| compounds of | Bromopropylate | Bromopropylate | Unknown |
| unknown or | | | |
| uncertain mode of | | | |
| action | | | |
| compounds of | Chinomethionat | Chinomethionat | Unknown |
| unknown or | | | |
| uncertain mode of | | | |
| action | | | |
| compounds of | Dicofol | Dicofol | Unknown |
| unknown or | | | |
| uncertain mode of | | | |
| action | | | |
| compounds of | lime sulfur | lime sulfur | Unknown |
| unknown or | | | |
| uncertain mode of | | | |
| action | | | |
| compounds of | Pyridalyl | Pyridalyl | Unknown |
| unknown or | | | |
| uncertain mode of | | | |
| action | | | |
| compounds of | sulfur | sulfur | Unknown |
| unknown or | | | |
| uncertain mode of | | | |
| action | | | |

TABLE 10
Exemplary list of pesticides, which can be
combined with microbes of the disclosure

| Category | Compounds |
|---|---|
| INSECTICIDES | |
| arsenical insecticides | calcium arsenate |
| | copper acetoarsenite |
| | copper arsenate |
| | lead arsenate |
| | potassium arsenite |
| | sodium arsenite |
| botanical insecticides | allicin |
| | anabasine |
| | azadirachtin |
| | carvacrol |
| | d-limonene |
| | matrine |
| | nicotine |
| | nornicotine |
| | oxymatrine |
| | pyrethrins |
| | cinerins |
| | cinerin I |
| | cinerin II |
| | jasmolin I |
| | jasmolin II |
| | pyrethrin I |
| | pyrethrin II |
| | quassia |
| | rhodojaponin-III |
| | rotenone |
| | ryania |
| | sabadilla |
| | sanguinarine |
| | triptolide |
| carbamate insecticides | bendiocarb |
| | carbaryl |
| benzofuranyl methylcarbamate insecticides | benfuracarb |
| | carbofuran |
| | carbosulfan |
| | decarbofuran |
| | furathiocarb |
| dimethylcarbamate insecticides | dimetan |
| | dimetilan |
| | hyquincarb |
| | isolan |
| | pirimicarb |
| | pyramat |
| | pyrolan |
| oxime carbamate insecticides | alanycarb |
| | aldicarb |
| | aldoxycarb |
| | butocarboxim |
| | butoxycarboxim |
| | methomyl |
| | nitrilacarb |
| | oxamyl |
| | tazimcarb |
| | thiocarboxime |
| | thiodicarb |
| | thiofanox |
| phenyl methylcarbamate insecticides | allyxycarb |
| | aminocarb |
| | bufencarb |
| | butacarb |
| | carbanolate |
| | cloethocarb |
| | CPMC |
| | dicresyl |
| | dimethacarb |
| | dioxacarb |
| | EMPC |
| | ethiofencarb |
| | fenethacarb |
| | fenobucarb |
| | isoprocarb |
| | methiocarb |
| | metolcarb |
| | mexacarbate |
| | promacyl |
| | promecarb |
| | propoxur |
| | trimethacarb |
| | XMC |
| | xylylcarb |
| diamide insecticides | broflanilide |
| | chlorantraniliprole |
| | cyantraniliprole |
| | cyclaniliprole |
| | cyhalodiamide |
| | flubendiamide |
| | tetraniliprole |
| dinitrophenol insecticides | dinex |
| | dinoprop |
| | dinosam |
| | DNOC |
| fluorine insecticides | barium hexafluorosilicate |
| | cryolite |
| | flursulamid |
| | sodium fluoride |
| | sodium hexafluorosilicate |
| | sulfluramid |
| formamidine insecticides | amitraz |
| | chlordimeform |
| | formetanate |
| | formparanate |
| | medimeform |
| | semiamitraz |
| fumigant insecticides | acrylonitrile |
| | carbon disulfide |
| | carbon tetrachloride |
| | carbonyl sulfide |
| | chloroform |
| | chloropicrin |
| | cyanogen |
| | para-dichlorobenzene |
| | 1,2-dichloropropane |
| | dithioether |
| | ethyl formate |
| | ethylene dibromide |
| | ethylene dichloride |
| | ethylene oxide |
| | hydrogen cyanide |
| | methyl bromide |
| | methyl iodide |
| | methylchloroform |
| | methylene chloride |
| | naphthalene |
| | phosphine |
| | sodium tetrathiocarbonate |
| | sulfuryl fluoride |
| | tetrachloroethane |
| inorganic insecticides | borax |
| | boric acid |
| | calcium polysulfide |
| | copper oleate |
| | diatomaceous earth |
| | mercurous chloride |
| | potassium thiocyanate |
| | silica gel |
| | sodium thiocyanate |
| insect growth regulators | |
| chitin synthesis inhibitors | buprofezin |
| | cyromazine |
| benzoylphenylurea chitin synthesis | bistrifluron |
| inhibitors | chlorbenzuron |
| | chlorfluazuron |
| | dichlorbenzuron |
| | diflubenzuron |
| | flucycloxuron |
| | flufenoxuron |
| | hexaflumuron |
| | lufenuron |
| | novaluron |
| | noviflumuron |
| | penfluron |
| | teflubenzuron |
| | triflumuron |
| juvenile hormone mimics | dayoutong |
| | epofenonane |
| | fenoxycarb |
| | hydroprene |
| | kinoprene |
| | methoprene |
| | pyriproxyfen |
| | triprene |
| juvenile hormones | juvenile hormone I |
| | juvenile hormone II |
| | juvenile hormone III |
| moulting hormone agonists | chromafenozide |
| | furan tebufenozide |
| | halofenozide |
| | methoxyfenozide |
| | tebufenozide |
| | yishijing |
| moulting hormones | α-ecdysone |
| | ecdysterone |
| moulting inhibitors | diofenolan |
| precocenes | precocene I |
| | precocene II |
| | precocene III |
| unclassified insect growth regulators | dicyclanil |
| macrocyclic lactone insecticides | |
| avermectin insecticides | abamectin |
| | doramectin |
| | emamectin |
| | eprinomectin |
| | ivermectin |
| | selamectin |
| milbemycin insecticides | lepimectin |
| | milbemectin |
| | milbemycin oxime |
| | moxidectin |
| spinosyn insecticides | spinetoram |
| | spinosad |
| neonicotinoid insecticides | |
| nitroguanidine neonicotinoid insecticides | clothianidin |
| | dinotefuran |
| | imidacloprid |
| | imidaclothiz |
| | thiamethoxam |
| nitromethylene neonicotinoid insecticides | nitenpyram |
| | nithiazine |
| pyridylmethylamine neonicotinoid | acetamiprid |
| insecticides | imidacloprid |
| | nitenpyram |
| | paichongding |
| | thiacloprid |
| nereistoxin analogue insecticides | bensultap |
| | cartap |
| | polythialan |
| | thiocyclam |
| | thiosultap |
| organochlorine insecticides | bromo-DDT |
| | camphechlor |
| | DDT |
| | pp′-DDT |
| | ethyl-DDD |
| | HCH |
| | gamma-HCH |
| | lindane |
| | methoxychlor |
| | pentachlorophenol |
| | TDE |
| cyclodiene insecticides | aldrin |
| | bromocyclen |
| | chlorbicyclen |
| | chlordane |
| | chlordecone |
| | dieldrin |
| | dilor |
| | endosulfan |
| | alpha-endosulfan |
| | endrin |
| | HEOD |
| | heptachlor |
| | HHDN |
| | isobenzan |
| | isodrin |
| | kelevan |
| | mirex |
| organophosphorus insecticides | |
| organophosphate insecticides | bromfenvinfos |
| | calvinphos |
| | chlorfenvinphos |
| | crotoxyphos |
| | dichlorvos |
| | dicrotophos |
| | dimethylvinphos |
| | fospirate |
| | heptenophos |
| | methocrotophos |
| | mevinphos |
| | monocrotophos |
| | naled |
| | naftalofos |
| | phosphamidon |
| | propaphos |
| | TEPP |
| | tetrachlorvinphos |
| organothiophosphate insecticides | dioxabenzofos |
| | fosmethilan |
| | phenthoate |
| aliphatic organothiophosphate insecticides | acethion |
| | acetophos |
| | amiton |
| | cadusafos |
| | chlorethoxyfos |
| | chlormephos |
| | demephion |
| | demephion-O |
| | demephion-S |
| | demeton |
| | demeton-O |
| | demeton-S |
| | demeton-methyl |
| | demeton-O-methyl |
| | demeton-S-methyl |
| | demeton-S-methylsulphon |
| | disulfoton |
| | ethion |
| | ethoprophos |
| | IPSP |
| | isothioate |
| | malathion |
| | methacrifos |
| | methylacetophos |
| | oxydemeton-methyl |
| | oxydeprofos |
| | oxydisulfoton |
| | phorate |
| | sulfotep |
| | terbufos |
| | thiometon |
| aliphatic amide organothiophosphate | amidithion |
| insecticides | cyanthoate |
| | dimethoate |
| | ethoate-methyl |
| | formothion |
| | mecarbam |
| | omethoate |
| | prothoate |
| | sophamide |
| | vamidothion |
| oxime organothiophosphate insecticides | chlorphoxim |
| | phoxim |
| | phoxim-methyl |
| heterocyclic organothiophosphate | azamethiphos |
| insecticides | colophonate |
| | coumaphos |
| | coumithoate |
| | dioxathion |
| | endothion |
| | menazon |
| | morphothion |
| | phosalone |
| | pyraclofos |
| | pyrazothion |
| | pyridaphenthion |
| | quinothion |
| benzothiopyran organothiophosphate | dithicrofos |
| insecticides | thicrofos |
| benzotriazine organothiophosphate | azinphos-ethyl |
| insecticides | azinphos-methyl |
| isoindole organothiophosphate insecticides | dialifos |
| | phosmet |
| isoxazole organothiophosphate insecticides | isoxathion |
| | zolaprofos |
| pyrazolopyrimidine organothiophosphate | chlorprazophos |
| insecticides | pyrazophos |
| pyridine organothiophosphate insecticides | chlorpyrifos |
| | chlorpyrifos-methyl |
| pyrimidine organothiophosphate | butathiofos |
| insecticides | diazinon |
| | etrimfos |
| | lirimfos |
| | pirimioxyphos |
| | pirimiphos-ethyl |
| | pirimiphos-methyl |
| | primidophos |
| | pyrimitate |
| | tebupirimfos |
| quinoxaline organothiophosphate | quinalphos |
| insecticides | quinalphos-methyl |
| thiadiazole organothiophosphate | athidathion |
| insecticides | lythidathion |
| | methidathion |
| | prothidathion |
| triazole organothiophosphate insecticides | isazofos |
| | triazophos |
| phenyl organothinphosphate insecticides | azothoate |
| | bromophos |
| | bromophos-ethyl |
| | carbophenothion |
| | chlorthiophos |
| | cyanophos |
| | cythioate |
| | dicapthon |
| | dichlofenthion |
| | etaphos |
| | famphur |
| | fenchlorphos |
| | fenitrothion |
| | fensulfothion |
| | fenthion |
| | fenthion-ethyl |
| | heterophos |
| | jodfenphos |
| | mesulfenfos |
| | parathion |
| | parathion-methyl |
| | phenkapton |
| | phosnichlor |
| | profenofos |
| | prothiofos |
| | sulprofos |
| | temephos |
| | trichlormetaphos-3 |
| | trifenofos |
| | xiaochongliulin |
| phosphonate insecticides | butonate |
| | trichlorfon |
| phosphonothioate insecticides | mecarphon |
| phenyl ethylphosphonothioate insecticides | fonofos |
| | trichloronat |
| phenyl phenylphosphonothioate | cyanofenphos |
| insecticides | EPN |
| | leptophos |
| phosphoramidate insecticides | crufomate |
| | fenamiphos |
| | fosthietan |
| | mephosfolan |
| | phosfolan |
| | phosfolan-methyl |
| | pirimetaphos |
| phosphoramidothioate insecticides | acephate |
| | chloramine phosphorus |
| | isocarbophos |
| | isofenphos |
| | isofenphos-methyl |
| | methamidophos |
| | phosglycin |
| | propetamphos |
| phosphorodiamide insecticides | dimefox |
| | mazidox |
| | mipafox |
| | schradan |
| oxadiazine insecticides | indoxacarb |
| oxadiazolone insecticides | metoxadiazone |
| phthalimide insecticides | dialifos |
| | phosmet |
| | tetramethrin |
| physical insecticides | maltodextrin |
| desiccant insecticides | boric acid |
| | diatomaceous earth |
| | silica gel |
| pyrazole insecticides | chlorantraniliprole |
| | cyantraniliprole |
| | cyclaniliprole |
| | dimetilan |
| | isolan |
| | tebufenpyrad |
| | tetraniliprole |
| | tolfenpyrad |
| phenylpyrazole insecticides | acetoprole |
| | ethiprole |
| | fipronil |
| | flufiprole |
| | pyraclofos |
| | pyrafluprole |
| | pyriprole |
| | pyrolan |
| | vaniliprole |
| pyrethroid insecticides | |
| pyrethroid ester insecticides | acrinathrin |
| | allethrin |
| | bioallethrin |
| | esdépalléthrine |
| | barthrin |
| | bifenthrin |
| | kappa-bifenthrin |
| | bioethanomethrin |
| | brofenvalerate |
| | brofluthrinate |
| | bromethrin |
| | butethrin |
| | chlorempenthrin |
| | cyclethrin |
| | cycloprothrin |
| | cyfluthrin |
| | beta-cyfluthrin |
| | cyhalothrin |
| | gamma-cyhalothrin |
| | lambda-cyhalothrin |
| | cypermethrin |
| | alpha-cypermethrin |
| | beta-cypermethrin |
| | theta-cypermethrin |
| | zeta-cypermethrin |
| | cyphenothrin |
| | deltamethrin |
| | dimefluthrin |
| | dimethrin |
| | empenthrin |
| | d-fanshiluquebingjuzhi |
| | chloroprallethrin |
| | fenfluthrin |
| | fenpirithrin |
| | fenpropathrin |
| | fenvalerate |
| | esfenvalerate |
| | flucythrinate |
| | fluvalinate |
| | tau-fluvalinate |
| | furamethrin |
| | furethrin |
| | heptafluthrin |
| | imiprothrin |
| | japothrins |
| | kadethrin |
| | methothrin |
| | metofluthrin |
| | epsilon-metofluthrin |
| | momfluorothrin |
| | epsilon-momfluorothrin |
| | pentmethrin |
| | permethrin |
| | biopermethrin |
| | transpermethrin |
| | phenothrin |
| | prallethrin |
| | profluthrin |
| | proparthrin |
| | pyresmethrin |
| | renofluthrin |
| | meperfluthrin |
| | resmethrin |
| | bioresmethrin |
| | cismethrin |
| | tefluthrin |
| | kappa-tefluthrin |
| | terallethrin |
| | tetramethrin |
| | tetramethylfluthrin |
| | tralocythrin |
| | tralomethrin |
| | transfluthrin |
| | valerate |
| pyrethroid ether insecticides | etofenprox |
| | flufenprox |
| | halfenprox |
| | protrifenbute |
| | silafluofen |
| pyrethroid oxime insecticides | sulfoxime |
| | thiofluoximate |
| pyrimidinamine insecticides | flufenerim |
| | pyrimidifen |
| pyrrole insecticides | chlorfenapyr |
| quaternary ammonium insecticides | sanguinarine |
| sulfoximine insecticides | sulfoxaflor |
| tetramic acid insecticides | spirotetramat |
| tetronic acid insecticides | spiromesifen |
| thiazole insecticides | clothianidin |
| | imidaclothiz |
| | thiamethoxam |
| | thiapronil |
| thiazolidine insecticides | tazimcarb |
| | thiacloprid |
| thiourea insecticides | diafenthiuron |
| urea insecticides | flucofuron |
| | sulcofuron |
| zwitterionic insecticides | dicloromezotiaz |
| | triflumezopyrim |
| unclassified insecticides | afidopyropen |
| | afoxolaner |
| | allosamidin |
| | closantel |
| | copper naphthenate |
| | crotamiton |
| | EXD |
| | fenazaflor |
| | fenoxacrim |
| | flometoquin |
| | flonicamid |
| | fluhexafon |
| | flupyradifurone |
| | fluralaner |
| | fluxametamide |
| | hydramethylnon |
| | isoprothiolane |
| | jiahuangchongzong |
| | malonoben |
| | metaflumizone |
| | nifluridide |
| | plifenate |
| | pyridaben |
| | pyridalyl |
| | pyrifluquinazon |
| | rafoxanide |
| | thuringiensin |
| | triarathene |
| | triazamate |
| ACARICIDES | |
| botanical acaricides | carvacrol |
| | sanguinarine |
| bridged diphenyl acaricides | azobenzene |
| | benzoximate |
| | benzyl benzoate |
| | bromopropylate |
| | chlorbenside |
| | chlorfenethol |
| | chlorfenson |
| | chlorfensulphide |
| | chlorobenzilate |
| | chloropropylate |
| | cyflumetofen |
| | DDT |
| | dicofol |
| | diphenyl sulfone |
| | dofenapyn |
| | fenson |
| | fentrifanil |
| | fluorbenside |
| | genit |
| | hexachlorophene |
| | phenproxide |
| | proclonol |
| | tetradifon |
| | tetrasul |
| carbamate acaricides | benomyl |
| | carbanolate |
| | carbaryl |
| | carbofuran |
| | methiocarb |
| | metolcarb |
| | promacyl |
| | propoxur |
| oxime carbamate acaricides | aldicarb |
| | butocarboxim |
| | oxamyl |
| | thiocarboxime |
| | thiofanox |
| carbazate acaricides | bifenazate |
| dinitrophenol acaricides | binapacryl |
| | dinex |
| | dinobuton |
| | dinocap |
| | dinocap-4 |
| | dinocap-6 |
| | dinocton |
| | dinopenton |
| | dinosulfon |
| | dinoterbon |
| | DNOC |
| formamidine acaricides | amitraz |
| | chlordimeform |
| | chloromebuform |
| | formetanate |
| | formparanate |
| | medimeform |
| | semiamitraz |
| macrocyclic lactone acaricides | tetranactin |
| avermectin acaricides | abamectin |
| | doramectin |
| | eprinomectin |
| | ivermectin |
| | selamectin |
| milbemycin acaricides | milbemectin |
| | milbemycin oxime |
| | moxidectin |
| mite growth regulators | clofentezine |
| | cyromazine |
| | diflovidazin |
| | dofenapyn |
| | fluazuron |
| | flubenzimine |
| | flucycloxuron |
| | flufenoxuron |
| | hexythiazox |
| organochlorine acaricides | bromocyclen |
| | camphechlor |
| | DDT |
| | dienochlor |
| | endosulfan |
| | lindane |
| organophosphorus acaricides | |
| organophosphate acaricides | chlorfenvinphos |
| | crotoxyphos |
| | dichlorvos |
| | heptenophos |
| | mevinphos |
| | monocrotophos |
| | naled |
| | TEPP |
| | tetrachlorvinphos |
| organothiophosphate acaricides | amidithion |
| | amiton |
| | azinphos-ethyl |
| | azinphos-methyl |
| | azothoate |
| | benoxafos |
| | bromophos |
| | bromophos-ethyl |
| | carbophenothion |
| | chlorpyrifos |
| | chlorthiophos |
| | coumaphos |
| | cyanthoate |
| | demeton |
| | demeton-O |
| | demeton-S |
| | demeton-methyl |
| | demeton-O-methyl |
| | demeton-S-methyl |
| | demeton-S-methylsulphon |
| | dialifos |
| | diazinon |
| | dimethoate |
| | dioxathion |
| | disulfoton |
| | endothion |
| | ethion |
| | ethoate-methyl |
| | formothion |
| | malathion |
| | mecarbam |
| | methacrifos |
| | omethoate |
| | oxydeprofos |
| | oxydisulfoton |
| | parathion |
| | phenkapton |
| | phorate |
| | phosalone |
| | phosmet |
| | phostin |
| | phoxim |
| | pirimiphos-methyl |
| | prothidathion |
| | prothoate |
| | pyrimitate |
| | quinalphos |
| | qumtiofos |
| | sophamide |
| | sulfotep |
| | thiometon |
| | triazophos |
| | trifenofos |
| | vamidothion |
| phosphonate acaricides | trichlorfon |
| phosphoramidothioate acaricides | isocarbophos |
| | methamidophos |
| | propetamphos |
| phosphorodiamide acaricides | dimefox |
| | mipafox |
| | schradan |
| organotin acaricides | azocyclotin |
| | cyhexatin |
| | fenbutatin oxide |
| | phostin |
| phenylsulfamide acaricides | dichlofluanid |
| phthalimide acaricides | dialifos |
| | phosmet |
| pyrazole acaricides | cyenopyrafen |
| | fenpyroximate |
| | pyflubumide |
| | tebufenpyrad |
| phenylpyrazole acaricides | acetoprole |
| | fipronil |
| | vaniliprole |
| pyrethroid acaricides | |
| pyrethroid ester acaricides | acrinathrin |
| | bifenthrin |
| | brofluthrinate |
| | cyhalothrin |
| | cypermethrin |
| | alpha-cypermethrin |
| | fenpropathrin |
| | fenvalerate |
| | flucythrinate |
| | flumethrin |
| | fluvalinate |
| | tau-fluvalinate |
| | permethrin |
| pyrethroid ether acaricides | halfenprox |
| pyrimidinamine acaricides | pyrimidifen |
| pyrrole acaricides | chlorfenapyr |
| quaternary ammonium acaricides | sanguinarine |
| quinoxaline acaricides | chinomethionat |
| | thioquinox |
| strobilurin acaricides | |
| methoxyacrylate strobilurin acaricides | bifujunzhi |
| | fluacrypyrim |
| | flufenoxystrobin |
| | pyriminostrobin |
| sulfite ester acaricides | aramite |
| | propargite |
| tetronic acid acaricides | spirodiclofen |
| tetrazine acaricides | clofentezine |
| | diflovidazin |
| thiazolidine acaricides | flubenzimine |
| | hexythiazox |
| thiocarbamate acaricides | fenothiocarb |
| thiourea acaricides | chloromethiuron |
| | diafenthiuron |
| unclassified acaricides | acequinocyl |
| | afoxolaner |
| | amidoflumet |
| | arsenous oxide |
| | clenpirin |
| | closantel |
| | crotamiton |
| | cycloprate |
| | cymiazole |
| | disulfiram |
| | etoxazole |
| | fenazaflor |
| | fenazaquin |
| | fluenetil |
| | fluralaner |
| | mesulfen |
| | MNAF |
| | nifluridide |
| | nikkomycins |
| | pyridaben |
| | sulfiram |
| | sulfluramid |
| | sulfur |
| | thuringiensin |
| | triarathene |
| CHEMOSTERILANTS | |
| | apholate |
| | bisazir |
| | busulfan |
| | diflubenzuron |
| | dimatif |
| | hemel |
| | hempa |
| | metepa |
| | methiotepa |
| | methyl apholate |
| | morzid |
| | penfluron |
| | tepa |
| | thiohempa |
| | thiotepa |
| | tretamine |
| | uredepa |
| INSECT REPELLENTS | |
| | acrep |
| | butopyronoxyl |
| | camphor |
| | d-camphor |
| | carboxide |
| | dibutyl phthalate |
| | diethyltoluamide |
| | dimethyl carbate |
| | dimethyl phthalate |
| | dibutyl succinate |
| | ethohexadiol |
| | hexamide |
| | icaridin |
| | methoquin-butyl |
| | methylneodecanamide |
| | 2-(octylthio)ethanol |
| | oxamate |
| | quwenzhi |
| | quyingding |
| | rebemide |
| | zengxiaoan |
| NEMATICIDES | |
| avermectin nematicides | abamectin |
| botanical nematicides | carvacrol |
| carbamate nematicides | benomyl |
| | carbofuran |
| | carbosulfan |
| | cloethocarb |
| oxime carbamate nematicides | alanycarb |
| | aldicarb |
| | aldoxycarb |
| | oxamyl |
| | tirpate |
| fumigant nematicides | carbon disulfide |
| | cyanogen |
| | 1,2-dichloropropane |
| | 1,3-dichloropropene |
| | dithioether |
| | methyl bromide |
| | methyl iodide |
| | sodium tetrathiocarbonate |
| organophosphorus nematicides | |
| organophosphate nematicides | diamidafos |
| | fenamiphos |
| | fosthietan |
| | phosphamidon |
| organothiophosphate nematicides | cadusafos |
| | chlorpyrifos |
| | dichlofenthion |
| | dimethoate |
| | ethoprophos |
| | fensulfothion |
| | fosthiazate |
| | heterophos |
| | isamidofos |
| | isazofos |
| | phorate |
| | phosphocarb |
| | terbufos |
| | thionazin |
| | triazophos |
| phosphonothioate nematicides | imicyafos |
| | mecarphon |
| unclassified nematicides | acetoprole |
| | benclothiaz |
| | chloropicrin |
| | dazomet |
| | DBCP |
| | DCIP |
| | fluazaindolizine |
| | fluensulfone |
| | furfural |
| | metam |
| | methyl isothiocyanate |
| | tioxazafen |
| | xylenols |

[0350] Insecticides also include synergists or activators that are not in themselves considered toxic or insecticidal, but are materials used with insecticides to synergize or enhance the activity of the insecticides. Synergists or activators include piperonyl butoxide.

### Biorational Pesticides

[0351] Insecticides can be biorational, or can also be known as biopesticides or biological pesticides. Biorational refers to any substance of natural origin (or man-made substances resembling those of natural origin) that has a detrimental or lethal effect on specific target pest(s), e.g., insects, weeds, plant diseases (including nematodes), and vertebrate pests, possess a unique mode of action, are non-toxic to man, domestic plants and animals, and have little or no adverse effects on wildlife and the environment.

[0352] Biorational insecticides (or biopesticides or biological pesticides) can be grouped as: (1) biochemicals (hormones, enzymes, pheromones and natural agents, such as insect and plant growth regulators), (2) microbial (viruses, bacteria, fungi, protozoa, and nematodes), or (3) Plant-Incorporated protectants (PIPs)—primarily transgenic plants, e.g., Bt corn.

[0353] Biopesticides, or biological pesticides, can broadly include agents manufactured from living microorganisms or a natural product and sold for the control of plant pests. Biopesticides can be: microorganisms, biochemicals, and semiochemicals. Biopesticides can also include peptides, proteins and nucleic acids such as double-stranded DNA, single-stranded DNA, double-stranded RNA, single-stranded RNA and hairpin DNA or RNA.

[0354] Bacteria, fungi, oomycetes, viruses and protozoa are all used for the biological control of insect pests. The most widely used microbial biopesticide is the insect pathogenic bacteria Bacillus thuringiensis (Bt), which produces a protein crystal (the Bt δ-endotoxin) during bacterial spore formation that is capable of causing lysis of gut cells when consumed by susceptible insects. Microbial Bt biopesticides consist of bacterial spores and δ-endotoxin crystals mass-produced in fermentation tanks and formulated as a sprayable product. Bt does not harm vertebrates and is safe to people, beneficial organisms and the environment. Thus, Bt sprays are a growing tactic for pest management on fruit and vegetable crops where their high level of selectivity and safety are considered desirable, and where resistance to synthetic chemical insecticides is a problem. Bt sprays have also been used on commodity crops such as maize, soybean and cotton, but with the advent of genetic modification of plants, farmers are increasingly growing Bt transgenic crop varieties.

[0355] Other microbial insecticides include products based on entomopathogenic baculoviruses. Baculoviruses that are pathogenic to arthropods belong to the virus family and possess large circular, covalently closed, and double-stranded DNA genomes that are packaged into nucleocapsids. More than 700 baculoviruses have been identified from insects of the orders Lepidoptera, Hymenoptera, and Diptera. Baculoviruses are usually highly specific to their host insects and thus, are safe to the environment, humans, other plants, and beneficial organisms. Over 50 baculovirus products have been used to control different insect pests worldwide. In the US and Europe, the Cydia pomonella granulovirus (CpGV) is used as an inundative biopesticide against codling moth on apples. Washington State, as the biggest apple producer in the US, uses CpGV on 13% of the apple crop. In Brazil, the nucleopolyhedrovirus of the soybean caterpillar Anticarsia gemmatalis was used on up to 4 million ha (approximately 35%) of the soybean crop in the mid-1990s. Viruses such as Gemstar® (Certis USA) are available to control larvae of Heliothis and Helicoverpa species.

[0356] At least 170 different biopesticide products based on entomopathogenic fungi have been developed for use against at least five insect and acarine orders in glasshouse crops, fruit and field vegetables as well as commodity crops. The majority of products are based on the ascomycetes Beauveria bassiana or Metarhizium anisopliae. M anisopliae has also been developed for the control of locust and grasshopper pests in Africa and Australia and is recommended by the Food and Agriculture Organization of the United Nations (FAO) for locust management.

[0357] A number of microbial pesticides registered in the United States are listed in Table 16 of Kabaluk et al. 2010 (Kabaluk, J. T. et al. (ed.). 2010. The Use and Regulation of Microbial Pesticides in Representative Jurisdictions Worldwide. IOBC Global. 99pp.) and microbial pesticides registered in selected countries are listed in Annex 4 of Hoeschle-Zeledon et al. 2013 (Hoeschle-Zeledon, I., P. Neuenschwander and L. Kumar. (2013). Regulatory Challenges for biological control. SP-IPM Secretariat, International Institute of Tropical Agriculture (IITA), Ibadan, Nigeria. 43 pp.), each of which is incorporated herein in its entirety.

[0358] Plants produce a wide variety of secondary metabolites that deter herbivores from feeding on them. Some of these can be used as biopesticides. They include, for example, pyrethrins, which are fast-acting insecticidal compounds produced by Chrysanthemum cinerariaefolium. They have low mammalian toxicity but degrade rapidly after application. This short persistence prompted the development of synthetic pyrethrins (pyrethroids). The most widely used botanical compound is neem oil, an insecticidal chemical extracted from seeds of Azadirachta indica. Two highly active pesticides are available based on secondary metabolites synthesized by soil actinomycetes, but they have been evaluated by regulatory authorities as if they were synthetic chemical pesticides. Spinosad is a mixture of two macrolide compounds from Saccharopolyspora spinosa. It has a very low mammalian toxicity and residues degrade rapidly in the field. Farmers and growers used it widely following its introduction in 1997 but resistance has already developed in some important pests such as western flower thrips. Abamectin is a macrocyclic lactone compound produced by Streptomyces avermitilis. It is active against a range of pest species but resistance has developed to it also, for example, in tetranychid mites.

[0359] Peptides and proteins from a number of organisms have been found to possess pesticidal properties. Perhaps most prominent are peptides from spider venom (King, G. F. and Hardy, M. C. (2013) Spider-venom peptides: structure, pharmacology, and potential for control of insect pests. Annu. Rev. Entomol. 58: 475-496). A unique arrangement of disulfide bonds in spider venom peptides render them extremely resistant to proteases. As a result, these peptides are highly stable in the insect gut and hemolymph and many of them are orally active. The peptides target a wide range of receptors and ion channels in the insect nervous system. Other examples of insecticidal peptides include: sea anemone venom that act on voltage-gated Na+ channels (Bosmans, F. and Tytgat, J. (2007) Sea anemone venom as a source of insecticidal peptides acting on voltage-gated Na+ channels. Toxicon. 49(4): 550-560); the PA1b (Pea Albumin 1, subunit b) peptide from Legume seeds with lethal activity on several insect pests, such as mosquitoes, some aphids and cereal weevils (Eyraud, V. et al. (2013) Expression and Biological Activity of the Cystine Knot Bioinsecticide PA1b (Pea Albumin 1 Subunit b). PLoS ONE 8(12): e81619); and an internal 10 kDa peptide generated by enzymatic hydrolysis of Canavalia ensiformis (jack bean) urease within susceptible insects (Martinelli, A. H. S., et al. (2014) Structure—function studies on jaburetox, a recombinant insecticidal peptide derived from jack bean (Canavalia ensiformis) urease. Biochimica et Biophysica Acta 1840: 935-944). Examples of commercially available peptide insecticides include Spear™—T for the treatment of thrips in vegetables and ornamentals in greenhouses, Spear™—P to control the Colorado Potato Beetle, and Spear™—C to protect crops from lepidopteran pests (Vestaron Corporation, Kalamazoo, Mich.). A novel insecticidal protein from Bacillus bombysepticus, called parasporal crystal toxin (PC), shows oral pathogenic activity and lethality towards silkworms and Cry1Ac-resistant Helicoverpa armigera strains (Lin, P. et al. (2015) PC, a novel oral insecticidal toxin from Bacillus bombysepticus involved in host lethality via APN and BtR-175. Sci. Rep. 5: 11101).

[0360] A semiochemical is a chemical signal produced by one organism that causes a behavioral change in an individual of the same or a different species. The most widely used semiochemicals for crop protection are insect sex pheromones, some of which can now be synthesized and are used for monitoring or pest control by mass trapping, lure-and-kill systems and mating disruption. Worldwide, mating disruption is used on over 660,000 ha and has been particularly useful in orchard crops.

[0361] As used herein, “transgenic insecticidal trait” refers to a trait exhibited by a plant that has been genetically engineered to express a nucleic acid or polypeptide that is detrimental to one or more pests. In one embodiment, the plants of the present disclosure are resistant to attach and/or infestation from any one or more of the pests of the present disclosure. In one embodiment, the trait comprises the expression of vegetative insecticidal proteins (VIPs) from Bacillus thuringiensis, lectins and proteinase inhibitors from plants, terpenoids, cholesterol oxidases from Streptomyces spp., insect chitinases and fungal chitinolytic enzymes, bacterial insecticidal proteins and early recognition resistance genes. In another embodiment, the trait comprises the expression of a Bacillus thuringiensis protein that is toxic to a pest. In one embodiment, the Bt protein is a Cry protein (crystal protein). Bt crops include Bt corn, Bt cotton and Bt soy. Bt toxins can be from the Cry family (see, for example, Crickmore et al., 1998, Microbiol. Mol. Biol. Rev. 62: 807-812), which are particularly effective against Lepidoptera, Coleoptera and Diptera.

[0362] Bt Cry and Cyt toxins belong to a class of bacterial toxins known as pore-forming toxins (PFT) that are secreted as water-soluble proteins undergoing conformational changes in order to insert into, or to translocate across, cell membranes of their host. There are two main groups of PFT: (i) the α-helical toxins, in which α-helix regions form the trans-membrane pore, and (ii) the β-barrel toxins, that insert into the membrane by forming a β-barrel composed of βsheet hairpins from each monomer. See, Parker M W, Feil S C, “Pore-forming protein toxins: from structure to function,” Prog. Biophys. Mol. Biol. 2005 May; 88(1):91-142. The first class of PFT includes toxins such as the colicins, exotoxin A, diphtheria toxin and also the Cry three-domain toxins. On the other hand, aerolysin, α-hemolysin, anthrax protective antigen, cholesterol-dependent toxins as the perfringolysin O and the Cyt toxins belong to the β-barrel toxins. Id. In general, PFT producing-bacteria secrete their toxins and these toxins interact with specific receptors located on the host cell surface. In most cases, PFT are activated by host proteases after receptor binding inducing the formation of an oligomeric structure that is insertion competent. Finally, membrane insertion is triggered, in most cases, by a decrease in pH that induces a molten globule state of the protein. Id.

[0363] The development of transgenic crops that produce Bt Cry proteins has allowed the substitution of chemical insecticides by environmentally friendly alternatives. In transgenic plants the Cry toxin is produced continuously, protecting the toxin from degradation and making it reachable to chewing and boring insects. Cry protein production in plants has been improved by engineering cry genes with a plant biased codon usage, by removal of putative splicing signal sequences and deletion of the carboxy-terminal region of the protoxin. See, Schuler T H, et al., “Insect-resistant transgenic plants,” Trends Biotechnol. 1998; 16:168-175. The use of insect resistant crops has diminished considerably the use of chemical pesticides in areas where these transgenic crops are planted. See, Qaim M, Zilberman D, “Yield effects of genetically modified crops in developing countries,” Science. 2003 Feb. 7; 299(5608):900-2.

[0364] Known Cry proteins include: δ-endotoxins including but not limited to: the Cry1, Cry2, Cry3, Cry4, Cry5, Cry6, Cry7, Cry8, Cry9, Cry10, Cry11, Cry12, Cry13, Cry14, Cry15, Cry16, Cry17, Cry18, Cry19, Cry20, Cry21, Cry22, Cry23, Cry24, Cry25, Cry26, Cry27, Cry 28, Cry 29, Cry 30, Cry31, Cry32, Cry33, Cry34, Cry35, Cry36, Cry37, Cry38, Cry39, Cry40, Cry41, Cry42, Cry43, Cry44, Cry45, Cry 46, Cry47, Cry49, Cry 51, Cry52, Cry 53, Cry 54, Cry55, Cry56, Cry57, Cry58, Cry59. Cry60, Cry61, Cry62, Cry63, Cry64, Cry65, Cry66, Cry67, Cry68, Cry69, Cry70 and Cry71 classes of δ-endotoxin genes and the B. thuringiensis cytolytic cyt1 and cyt2 genes.

[0365] Members of these classes of B. thuringiensis insecticidal proteins include, but are not limited to: Cry1Aa1 (Accession #AAA22353); Cry1Aa2 (Accession #Accession #AAA22552); Cry1Aa3 (Accession #BAA00257); Cry1Aa4 (Accession #CAA31886); Cry1Aa5 (Accession #BAA04468); Cry1Aa6 (Accession #AAA86265); Cry1Aa7 (Accession #AAD46139); Cry1Aa8 (Accession #126149); Cry1Aa9 (Accession #BAA77213); Cry1Aa10 (Accession #AAD55382); Cry1Aa1 1 (Accession #CAA70856); Cry1Aa12 (Accession #AAP80146); Cry1Aa13 (Accession #AAM44305); Cry1Aa14 (Accession #AAP40639); Cry1Aa15 (Accession #AAY66993); Cry1Aa16 (Accession #HQ439776); Cry1Aa17 (Accession #HQ439788); Cry1Aa18 (Accession #HQ439790); Cry1Aa19 (Accession #HQ685121); Cry1Aa20 (Accession #JF340156); Cry1Aa21 (Accession #JN651496); Cry1Aa22 (Accession #KC158223); Cry1Ab1 (Accession #AAA22330); Cry1Ab2 (Accession #AAA22613); Cry1Ab3 (Accession #AAA22561); Cry1Ab4 (Accession #BAA00071); Cry1Ab5 (Accession #CAA28405); Cry1Ab6 (Accession #AAA22420); Cry1Ab7 (Accession #CAA31620); Cry1Ab8 (Accession #AAA22551); Cry1Ab9 (Accession #CAA38701); Cry1Ab10 (Accession #A29125); Cry1Ab11 (Accession #112419); Cry1Ab12 (Accession #AAC64003); Cry1Ab13 (Accession #AAN76494); Cry1Ab14 (Accession #AAG16877); Cry1Ab15 (Accession #AA013302); Cry1Ab16 (Accession #AAK55546); Cry1Ab17 (Accession #AAT46415); Cry1Ab18 (Accession #AAQ88259); Cry1Ab19 (Accession #AAW31761); Cry1Ab20 (Accession #ABB72460); Cry1Ab21 (Accession #ABS18384); Cry1Ab22 (Accession #ABW87320); Cry1Ab23 (Accession #HQ439777); Cry1Ab24 (Accession #HQ439778); Cry1Ab25 (Accession #HQ685122); Cry1Ab26 (Accession #HQ847729); Cry1Ab27 (Accession #JN135249); Cry1Ab28 (Accession #JN135250); Cry1Ab29 (Accession #JN135251); Cry1Ab30 (Accession #JN135252); Cry1Ab31 (Accession #JN135253); Cry1Ab32 (Accession #JN135254); Cry1Ab33 (Accession #AAS93798); Cry1Ab34 (Accession #KC156668); Cry1Ab-like (Accession #AAK14336); Cry1Ab-like (Accession #AAK14337); Cry1Ab-like (Accession #AAK14338); Cry1Ab-like (Accession #ABG88858); Cry1Ac1 (Accession #AAA22331); Cry1Ac2 (Accession #AAA22338); Cry1Ac3 (Accession #CAA38098); Cry1Ac4 (Accession #AAA73077); Cry1Ac5 (Accession #AAA22339); Cry1Ac6 (Accession #AAA86266); Cry1Ac7 (Accession #AAB46989); Cry1Ac8 (Accession #AAC44841); Cry1Ac9 (Accession #AAB49768); Cry1Ac10 (Accession #CAA05505); Cry1Ac11 (Accession #CAA10270); Cry1Ac12 (Accession #112418); Cry1Ac13 (Accession #AAD38701); Cry1Ac14 (Accession #AAQ06607); Cry1Ac15 (Accession #AAN07788); Cry1Ac16 (Accession #AAU87037); Cry1Ac17 (Accession #AAX18704); Cry1Ac18 (Accession #AAY88347); Cry1Ac19 (Accession #ABD37053); Cry1Ac20 (Accession #ABB89046); Cry1Ac21 (Accession #AAY66992); Cry1Ac22 (Accession #ABZ01836); Cry1Ac23 (Accession #CAQ30431); Cry1Ac24 (Accession #ABL01535); Cry1Ac25 (Accession #FJ513324); Cry1Ac26 (Accession #FJ617446); Cry1Ac27 (Accession #FJ617447); Cry1Ac28 (Accession #ACM90319); Cry1Ac29 (Accession #DQ438941); Cry1Ac30 (Accession #GQ227507); Cry1Ac31 (Accession #GU446674); Cry1Ac32 (Accession #HM061081); Cry1Ac33 (Accession #GQ866913); Cry1Ac34 (Accession #HQ230364); Cry1Ac35 (Accession #JF340157); Cry1Ac36 (Accession #JN387137); Cry1Ac37 (Accession #JQ317685); Cry1Ad1 (Accession #AAA22340); Cry1Ad2 (Accession #CAA01880); Cry1Ae1 (Accession #AAA22410); Cry1Af1 (Accession #AAB82749); Cry1Ag1 (Accession #AAD46137); Cry1Ah1 (Accession #AAQ14326); Cry1Ah2 (Accession #ABB76664); Cry1Ah3 (Accession #HQ439779); Cry1Ai1 (Accession #AA039719); Cry1Ai2 (Accession #HQ439780); Cry1A-like (Accession #AAK14339); Cry1Ba1 (Accession #CAA29898); Cry1Ba2 (Accession #CAA65003); Cry1Ba3 (Accession #AAK63251); Cry1Ba4 (Accession #AAK51084); Cry1Ba5 (Accession #AB020894); Cry1Ba6 (Accession #ABL60921); Cry1Ba7 (Accession #HQ439781); Cry1Bb1 (Accession #AAA22344); Cry1Bb2 (Accession #HQ439782); Cry1Bc1 (Accession #CAA86568); Cry1Bd1 (Accession #AAD10292); Cry1Bd2 (Accession #AAM93496); Cry1Be1 (Accession #AAC32850); Cry1Be2 (Accession #AAQ52387); Cry1Be3 (Accession #ACV96720); Cry1Be4 (Accession #HM070026); Cry1Bf1 (Accession #CAC50778); Cry1Bf2 (Accession #AAQ52380); Cry1Bg1 (Accession #AA039720); Cry1Bh1 (Accession #HQ589331); Cry1Bi1 (Accession #KC156700); Cry1Ca1 (Accession #CAA30396); Cry1Ca2 (Accession #CAA31951); Cry1Ca3 (Accession #AAA22343); Cry1Ca4 (Accession #CAA01886); Cry1Ca5 (Accession #CAA65457); Cry1Ca6 [1] (Accession #AAF37224); Cry1Ca7 (Accession #AAG50438); Cry1Ca8 (Accession #AAM00264); Cry1Ca9 (Accession #AAL79362); Cry1Ca10 (Accession #AAN16462); Cry1Ca11 (Accession #AAX53094); Cry1Ca12 (Accession #HM070027); Cry1Ca13 (Accession #HQ412621); Cry1Ca14 (Accession #JN651493); Cry1Cb1 (Accession #M97880); Cry1Cb2 (Accession #AAG35409); Cry1Cb3 (Accession #ACD50894); Cry1Cb-like (Accession #AAX63901); Cry1Da1 (Accession #CAA38099); Cry1Da2 (Accession #176415); Cry1Da3 (Accession #HQ439784); Cry1 Db1 (Accession #CAA80234); Cry1 Db2 (Accession #AAK48937); Cry1 Dc1 (Accession #ABK35074); Cry1Ea1 (Accession #CAA37933); Cry1Ea2 (Accession #CAA39609); Cry1Ea3 (Accession #AAA22345); Cry1Ea4 (Accession #AAD04732); Cry1Ea5 (Accession #A15535); Cry1Ea6 (Accession #AAL50330); Cry1Ea7 (Accession #AAW72936); Cry1Ea8 (Accession #ABX11258); Cry1Ea9 (Accession #HQ439785); Cry1Ea10 (Accession #ADR00398); Cry1Ea11 (Accession #JQ652456); Cry1Eb1 (Accession #AAA22346); Cry1Fa1 (Accession #AAA22348); Cry1Fa2 (Accession #AAA22347); Cry1Fa3 (Accession #HM070028); Cry1Fa4 (Accession #HM439638); Cry1 Fb1 (Accession #CAA80235); Cry1Fb2 (Accession #BAA25298); Cry1Fb3 (Accession #AAF21767); Cry1Fb4 (Accession #AAC10641); Cry1Fb5 (Accession #AA013295); Cry1Fb6 (Accession #ACD50892); Cry1Fb7 (Accession #ACD50893); Cry1Ga1 (Accession #CAA80233); Cry1 Ga2 (Accession #CAA70506); Cry1Gb1 (Accession #AAD10291); Cry1Gb2 (Accession #AA013756); Cry1Gc1 (Accession #AAQ52381); Cry1Ha1 (Accession #CAA80236); Cry1Hb1 (Accession #AAA79694); Cry1Hb2 (Accession #HQ439786); Cry1H-like (Accession #AAF01213); Cry1Ia1 (Accession #CAA44633); Cry1Ia2 (Accession #AAA22354); Cry1Ia3 (Accession #AAC36999); Cry1Ia4 (Accession #AAB00958); Cry1Ia5 (Accession #CAA70124); Cry1Ia6 (Accession #AAC26910); Cry1Ia7 (Accession #AAM73516); Cry1Ia8 (Accession #AAK66742); Cry1Ia9 (Accession #AAQ08616); Cry1Ia10 (Accession #AAP86782); Cry1Ia11 (Accession #CAC85964); Cry1Ia12 (Accession #AAV53390); Cry1Ia13 (Accession #ABF83202); Cry1Ia14 (Accession #ACG63871); Cry1Ia15 (Accession #FJ617445); Cry1Ia16 (Accession #FJ617448); Cry1Ia17 (Accession #GU989199); Cry1Ia18 (Accession #ADK23801); Cry1Ia19 (Accession #HQ439787); Cry1Ia20 (Accession #JQ228426); Cry1Ia21 (Accession #JQ228424); Cry1Ia22 (Accession #JQ228427); Cry1Ia23 (Accession #JQ228428); Cry1Ia24 (Accession #JQ228429); Cry1Ia25 (Accession #JQ228430); Cry1Ia26 (Accession #JQ228431); Cry1Ia27 (Accession #JQ228432); Cry1Ia28 (Accession #JQ228433); Cry1Ia29 (Accession #JQ228434); Cry1Ia30 (Accession #JQ317686); Cry1Ia31 (Accession #JX944038); Cry1Ia32 (Accession #JX944039); Cry1Ia33 (Accession #JX944040); Cry1Ib1 (Accession #AAA82114); Cry1Ib2 (Accession #ABW88019); Cry1Ib3 (Accession #ACD75515); Cry1Ib4 (Accession #HM051227); Cry1Ib5 (Accession #HM070028); Cry1Ib6 (Accession #ADK38579); Cry1Ib7 (Accession #JN571740); Cry1Ib8 (Accession #JN675714); Cry1Ib9 (Accession #JN675715); Cry1Ib10 (Accession #JN675716); Cry1Ib11 (Accession #JQ228423); Cry1Ic1 (Accession #AAC62933); Cry1Ic2 (Accession #AAE71691); Cry1Id1 (Accession #AAD44366); Cry1Id2 (Accession #JQ228422); Cry1Ie1 (Accession #AAG43526); Cry1Ie2 (Accession #HM439636); Cry1Ie3 (Accession #KC156647); Cry1Ie4 (Accession #KC156681); Cry1If1 (Accession #AAQ52382); Cry1Ig1 (Accession #KC156701); Cry1I-like (Accession #AAC31094); Cry1I-like (Accession #ABG88859); Cry1Ja1 (Accession #AAA22341); Cry1Ja2 (Accession #HM070030); Cry1Ja3 (Accession #JQ228425); Cry1Jb1 (Accession #AAA98959); Cry1Jc1 (Accession #AAC31092); Cry1Jc2 (Accession #AAQ52372); Cry1Jd1 (Accession #CAC50779); Cry1Ka1 (Accession #AAB00376); Cry1Ka2 (Accession #HQ439783); Cry1La1 (Accession #AAS60191); Cry1La2 (Accession #HM070031); Cry1Ma1 (Accession #FJ884067); Cry1Ma2 (Accession #KC156659); Cry1Na1 (Accession #KC156648); Cry1Nb1 (Accession #KC156678); Cry1-like (Accession #AAC31091); Cry2Aa1 (Accession #AAA22335); Cry2Aa2 (Accession #AAA83516); Cry2Aa3 (Accession #D86064); Cry2Aa4 (Accession #AAC04867); Cry2Aa5 (Accession #CAA10671); Cry2Aa6 (Accession #CAA10672); Cry2Aa7 (Accession #CAA10670); Cry2Aa8 (Accession #AA013734); Cry2Aa9 (Accession #AA013750); Cry2Aa1 O (Accession #AAQ04263); Cry2Aa1 1 (Accession #AAQ52384); Cry2Aa12 (Accession #AB183671); Cry2Aa13 (Accession #ABL01536); Cry2Aa14 (Accession #ACF04939); Cry2Aa15 (Accession #JN426947); Cry2Ab1 (Accession #AAA22342); Cry2Ab2 (Accession #CAA39075); Cry2Ab3 (Accession #AAG36762); Cry2Ab4 (Accession #AA013296); Cry2Ab5 (Accession #AAQ04609); Cry2Ab6 (Accession #AAP59457); Cry2Ab7 (Accession #AAZ66347); Cry2Ab8 (Accession #ABC95996); Cry2Ab9 (Accession #ABC74968); Cry2Ab10 (Accession #EF157306); Cry2Ab11 (Accession #CAM84575); Cry2Ab12 (Accession #ABM21764); Cry2Ab13 (Accession #ACG76120); Cry2Ab14 (Accession #ACG76121); Cry2Ab15 (Accession #HM037126); Cry2Ab16 (Accession #GQ866914); Cry2Ab1 7 (Accession #HQ439789); Cry2Ab18 (Accession #JN135255); Cry2Ab19 (Accession #JN135256); Cry2Ab20 (Accession #JN135257); Cry2Ab21 (Accession #JN135258); Cry2Ab22 (Accession #JN135259); Cry2Ab23 (Accession #JN135260); Cry2Ab24 (Accession #JN135261); Cry2Ab25 (Accession #JN415485); Cry2Ab26 (Accession #JN426946); Cry2Ab27 (Accession #JN415764); Cry2Ab28 (Accession #JN651494); Cry2Ac1 (Accession #CAA40536); Cry2Ac2 (Accession #AAG35410); Cry2Ac3 (Accession #AAQ52385); Cry2Ac4 (Accession #ABC95997); Cry2Ac5 (Accession #ABC74969); Cry2Ac6 (Accession #ABC74793); Cry2Ac7 (Accession #CAL18690); Cry2Ac8 (Accession #CAM09325); Cry2Ac9 (Accession #CAM09326); Cry2Ac10 (Accession #ABN15104); Cry2Ac11 (Accession #CAM83895); Cry2Ac12 (Accession #CAM83896); Cry2Ad1 (Accession #AAF09583); Cry2Ad2 (Accession #ABC86927); Cry2Ad3 (Accession #CAK29504); Cry2Ad4 (Accession #CAM32331); Cry2Ad5 (Accession #CA078739); Cry2Ae1 (Accession #AAQ52362); Cry2Af1 (Accession #AB030519); Cry2Af2 (Accession #GQ866915); Cry2Ag1 (Accession #ACH91610); Cry2Ah1 (Accession #EU939453); Cry2Ah2 (Accession #ACL80665); Cry2Ah3 (Accession #GU073380); Cry2Ah4 (Accession #KC156702); Cry2Ai1 (Accession #FJ788388); Cry2Aj (Accession #); Cry2Ak1 (Accession #KC156660); Cry2Ba1 (Accession #KC156658); Cry3Aa1 (Accession #AAA22336); Cry3Aa2 (Accession #AAA22541); Cry3Aa3 (Accession #CAA68482); Cry3Aa4 (Accession #AAA22542); Cry3Aa5 (Accession #AAA50255); Cry3Aa6 (Accession #AAC43266); Cry3Aa7 (Accession #CAB41411); Cry3Aa8 (Accession #AAS79487); Cry3Aa9 (Accession #AAW05659); Cry3Aa10 (Accession #AAU29411); Cry3Aa11 (Accession #AAW82872); Cry3Aa12 (Accession #ABY49136); Cry3Ba1 (Accession #CAA34983); Cry3Ba2 (Accession #CAA00645); Cry3Ba3 (Accession #JQ397327); Cry3Bb1 (Accession #AAA22334); Cry3Bb2 (Accession #AAA74198); Cry3Bb3 (Accession #115475); Cry3Ca1 (Accession #CAA42469); Cry4Aa1 (Accession #CAA68485); Cry4Aa2 (Accession #BAAOO1 79); Cry4Aa3 (Accession #CAD30148); Cry4Aa4 (Accession #AFB18317); Cry4A-like (Accession #AAY96321); Cry4Ba1 (Accession #CAA30312); Cry4Ba2 (Accession #CAA30114); Cry4Ba3 (Accession #AAA22337); Cry4Ba4 (Accession #BAAOO1 78); Cry4Ba5 (Accession #CAD30095); Cry4Ba-like (Accession #ABC47686); Cry4Ca1 (Accession #EU646202); Cry4Cb1 (Accession #FJ403208); Cry4Cb2 (Accession #FJ597622); Cry4Cc1 (Accession #FJ403207); Cry5Aa1 (Accession #AAA67694); Cry5Ab1 (Accession #AAA67693); Cry5Ac1 (Accession #134543); Cry5Ad1 (Accession #ABQ82087); Cry5Ba1 (Accession #AAA68598); Cry5Ba2 (Accession #ABW88931); Cry5Ba3 (Accession #AFJ04417); Cry5Ca1 (Accession #HM461869); Cry5Ca2 (Accession #ZP_04123426); Cry5Da1 (Accession #HM461870); Cry5Da2 (Accession #ZP_04123980); Cry5Ea1 (Accession #HM485580); Cry5Ea2 (Accession #ZP_04124038); Cry6Aa1 (Accession #AAA22357); Cry6Aa2 (Accession #AAM46849); Cry6Aa3 (Accession #ABH03377); Cry6Ba1 (Accession #AAA22358); Cry7 Aa1 (Accession #AAA22351); Cry7Ab1 (Accession #AAA21120); Cry7Ab2 (Accession #AAA21121); Cry7Ab3 (Accession #ABX24522); Cry7 Ab4 (Accession #EU380678); Cry7 Ab5 (Accession #ABX79555); Cry7 Ab6 (Accession #ACI44005); Cry7 Ab7 (Accession #ADB89216); Cry7 Ab8 (Accession #GU145299); Cry7Ab9 (Accession #ADD92572); Cry7Ba1 (Accession #ABB70817); Cry7Bb1 (Accession #KC156653); Cry7Ca1 (Accession #ABR67863); Cry7Cb1 (Accession #KC156698); Cry7Da1 (Accession #ACQ99547); Cry7Da2 (Accession #HM572236); Cry7Da3 (Accession #KC156679); Cry7Ea1 (Accession #HM035086); Cry7Ea2 (Accession #HM132124); Cry7Ea3 (Accession #EEM19403); Cry7Fa1 (Accession #HM035088); Cry7Fa2 (Accession #EEM19090); Cry7Fb1 (Accession #HM572235); Cry7Fb2 (Accession #KC156682); Cry7Ga1 (Accession #HM572237); Cry7Ga2 (Accession #KC156669); Cry7Gb1 (Accession #KC156650); Cry7Gc1 (Accession #KC156654); Cry7Gd1 (Accession #KC156697); Cry7Ha1 (Accession #KC156651); Cry7Ia1 (Accession #KC156665); Cry7Ja1 (Accession #KC156671); Cry7Ka1 (Accession #KC156680); Cry7Kb1 (Accession #BAM99306); Cry7La1 (Accession #BAM99307); Cry8Aa1 (Accession #AAA21117); Cry8Ab1 (Accession #EU044830); Cry8Ac1 (Accession #KC156662); Cry8Ad1 (Accession #KC156684); Cry8Ba1 (Accession #AAA21118); Cry8Bb1 (Accession #CAD57542); Cry8Bc1 (Accession #CAD57543); Cry8Ca1 (Accession #AAA21119); Cry8Ca2 (Accession #AAR98783); Cry8Ca3 (Accession #EU625349); Cry8Ca4 (Accession #ADB54826); Cry8Da1 (Accession #BAC07226); Cry8Da2 (Accession #BD133574); Cry8Da3 (Accession #BD133575); Cry8Db1 (Accession #BAF93483); Cry8Ea1 (Accession #AAQ73470); Cry8Ea2 (Accession #EU047597); Cry8Ea3 (Accession #KC855216); Cry8Fa1 (Accession #AAT48690); Cry8Fa2 (Accession #HQ174208); Cry8Fa3 (Accession #AFH78109); Cry8Ga1 (Accession #AAT46073); Cry8Ga2 (Accession #ABC42043); Cry8Ga3 (Accession #FJ198072); Cry8Ha1 (Accession #AAW81032); Cry8Ia1 (Accession #EU381044); Cry8Ia2 (Accession #GU073381); Cry8Ia3 (Accession #HM044664); Cry8Ia4 (Accession #KC156674); Cry8Ib1 (Accession #GU325772); Cry8Ib2 (Accession #KC156677); Cry8Ja1 (Accession #EU625348); Cry8Ka1 (Accession #FJ422558); Cry8Ka2 (Accession #ACN87262); Cry8Kb1 (Accession #HM123758); Cry8Kb2 (Accession #KC156675); Cry8La1 (Accession #GU325771); Cry8Ma1 (Accession #HM044665); Cry8Ma2 (Accession #EEM86551); Cry8Ma3 (Accession #HM210574); Cry8Na1 (Accession #HM640939); Cry8Pa1 (Accession #HQ388415); Cry8Qa1 (Accession #HQ441166); Cry8Qa2 (Accession #KC152468); Cry8Ra1 (Accession #AFP87548); Cry8Sa1 (Accession #JQ740599); Cry8Ta1 (Accession #KC156673); Cry8-like (Accession #FJ770571); Cry8-like (Accession #ABS53003); Cry9Aa1 (Accession #CAA41122); Cry9Aa2 (Accession #CAA41425); Cry9Aa3 (Accession #GQ249293); Cry9Aa4 (Accession #GQ249294); Cry9Aa5 (Accession #JX1 74110); Cry9Aa like (Accession #AAQ52376); Cry9Ba1 (Accession #CAA52927); Cry9Ba2 (Accession #GU299522); Cry9Bb1 (Accession #AAV28716); Cry9Ca1 (Accession #CAA85764); Cry9Ca2 (Accession #AAQ52375); Cry9Da1 (Accession #BAA1 9948); Cry9Da2 (Accession #AAB97923); Cry9Da3 (Accession #GQ249293); Cry9Da4 (Accession #GQ249297); Cry9Db1 (Accession #AAX78439); Cry9Dc1 (Accession #KCl 56683); Cry9Ea1 (Accession #BAA34908); Cry9Ea2 (Accession #AA012908); Cry9Ea3 (Accession #ABM21765); Cry9Ea4 (Accession #ACE88267); Cry9Ea5 (Accession #ACF04743); Cry9Ea6 (Accession #ACG63872); Cry9Ea7 (Accession #FJ380927); Cry9Ea8 (Accession #GQ249292); Cry9Ea9 (Accession #JN651495); Cry9Eb1 (Accession #CAC50780); Cry9Eb2 (Accession #GQ249298); Cry9Eb3 (Accession #KC156646); Cry9Ec1 (Accession #AAC63366); Cry9Ed1 (Accession #AAX78440); Cry9Ee1 (Accession #GQ249296); Cry9Ee2 (Accession #KC156664); Cry9Fa1 (Accession #KC156692); Cry9Ga1 (Accession #KC156699); Cry9-like (Accession #AAC63366); Cry1OAa1 (Accession #AAA22614); Cry10Aa2 (Accession #E00614); Cry10Aa3 (Accession #CAD30098); Cry10Aa4 (Accession #AFB18318); Cry1OA-like (Accession #DQ167578); Cry1 1Aa1 (Accession #AAA22352); Cry1 1Aa2 (Accession #AAA22611); Cry1 1Aa3 (Accession #CAD30081); Cry1 1Aa4 (Accession #AFB18319); Cry11Aa-like (Accession #DQ166531); Cry11Ba1 (Accession #CAA60504); Cry11Bb1 (Accession #AAC97162); Cry1 1Bb2 (Accession #HM068615); Cry12Aa1 (Accession #AAA22355); Cry13Aa1 (Accession #AAA22356); Cry14Aa1 (Accession #AAA21516); Cry14Ab1 (Accession #KC156652); Cry15Aa1 (Accession #AAA22333); Cry16Aa1 (Accession #CAA63860); Cry17Aa1 (Accession #CAA67841); Cry18Aa1 (Accession #CAA67506); Cry18Ba1 (Accession #AAF89667); Cry18Ca1 (Accession #AAF89668); Cry19Aa1 (Accession #CAA68875); Cry19Ba1 (Accession #BAA32397); Cry19Ca1 (Accession #AFM37572); Cry20Aa1 (Accession #AAB93476); Cry20Ba1 (Accession #ACS93601); Cry20Ba2 (Accession #KC156694); Cry20-like (Accession #GQ144333); Cry21Aa1 (Accession #132932); Cry21Aa2 (Accession #166477); Cry21Ba1 (Accession #BAC06484); Cry21Ca1 (Accession #JF521577); Cry21Ca2 (Accession #KC156687); Cry21Da1 (Accession #JF521578); Cry22Aa1 (Accession #134547); Cry22Aa2 (Accession #CAD43579); Cry22Aa3 (Accession #ACD93211); Cry22Ab1 (Accession #AAK50456); Cry22Ab2 (Accession #CAD43577); Cry22Ba1 (Accession #CAD43578); Cry22Bb1 (Accession #KC156672); Cry23Aa1 (Accession #AAF76375); Cry24Aa1 (Accession #AAC61891); Cry24Ba1 (Accession #BAD32657); Cry24Ca1 (Accession #CAJ43600); Cry25Aa1 (Accession #AAC61892); Cry26Aa1 (Accession #AAD25075); Cry27Aa1 (Accession #BAA82796); Cry28Aa1 (Accession #AAD24189); Cry28Aa2 (Accession #AAG00235); Cry29Aa1 (Accession #CAC80985); Cry30Aa1 (Accession #CAC80986); Cry30Ba1 (Accession #BAD00052); Cry30Ca1 (Accession #BAD67157); Cry30Ca2 (Accession #ACU24781); Cry30Da1 (Accession #EF095955); Cry30Db1 (Accession #BAE80088); Cry30Ea1 (Accession #ACC95445); Cry30Ea2 (Accession #FJ499389); Cry30Fa1 (Accession #ACI22625); Cry30Ga1 (Accession #ACG60020); Cry30Ga2 (Accession #HQ638217); Cry31Aa1 (Accession #BAB11 757); Cry31Aa2 (Accession #AAL87458); Cry31Aa3 (Accession #BAE79808); Cry31Aa4 (Accession #BAF32571); Cry31Aa5 (Accession #BAF32572); Cry31Aa6 (Accession #BA144026); Cry31Ab1 (Accession #BAE79809); Cry31Ab2 (Accession #BAF32570); Cry31Ac1 (Accession #BAF34368); Cry31Ac2 (Accession #AB731600); Cry31Ad1 (Accession #BA144022); Cry32Aa1 (Accession #AAG36711); Cry32Aa2 (Accession #GU063849); Cry32Ab1 (Accession #GU063850); Cry32Ba1 (Accession #BAB78601); Cry32Ca1 (Accession #BAB78602); Cry32Cb1 (Accession #KC156708); Cry32Da1 (Accession #BAB78603); Cry32Ea1 (Accession #GU324274); Cry32Ea2 (Accession #KC156686); Cry32Eb1 (Accession #KC156663); Cry32Fa1 (Accession #KC156656); Cry32Ga1 (Accession #KC156657); Cry32Ha1 (Accession #KC156661); Cry32Hb1 (Accession #KC156666); Cry32Ia1 (Accession #KCl 56667); Cry32Ja1 (Accession #KCl 56685); Cry32Ka1 (Accession #KCl 56688); Cry32La1 (Accession #KC156689); Cry32Ma1 (Accession #KC156690); Cry32Mb1 (Accession #KC156704); Cry32Na1 (Accession #KC156691); Cry32Oa1 (Accession #KC156703); Cry32Pa1 (Accession #KC156705); Cry32Qa1 (Accession #KC156706); Cry32Ra1 (Accession #KC156707); Cry32Sa1 (Accession #KC156709); Cry32Ta1 (Accession #KC156710); Cry32Ua1 (Accession #KC156655); Cry33Aa1 (Accession #AAL26871); Cry34Aa1 (Accession #AAG50341); Cry34Aa2 (Accession #AAK64560); Cry34Aa3 (Accession #AAT29032); Cry34Aa4 (Accession #AAT29030); Cry34Ab1 (Accession #AAG41671); Cry34Ac1 (Accession #AAG50118); Cry34Ac2 (Accession #AAK64562); Cry34Ac3 (Accession #AAT29029); Cry34Ba1 (Accession #AAK64565); Cry34Ba2 (Accession #AAT29033); Cry34Ba3 (Accession #AAT29031); Cry35Aa1 (Accession #AAG50342); Cry35Aa2 (Accession #AAK64561); Cry35Aa3 (Accession #AAT29028); Cry35Aa4 (Accession #AAT29025); Cry35Ab1 (Accession #AAG41672); Cry35Ab2 (Accession #AAK64563); Cry35Ab3 (Accession #AY536891); Cry35Ac1 (Accession #AAG50117); Cry35Ba1 (Accession #AAK64566); Cry35Ba2 (Accession #AAT29027); Cry35Ba3 (Accession #AAT29026); Cry36Aa1 (Accession #AAK64558); Cry37 Aa1 (Accession #AAF76376); Cry38Aa1 (Accession #AAK64559); Cry39Aa1 (Accession #BAB72016); Cry40Aa1 (Accession #BAB72018); Cry40Ba1 (Accession #BAC77648); Cry40Ca1 (Accession #EU381045); Cry40Da1 (Accession #ACF15199); Cry41Aa1 (Accession #BAD35157); Cry41Ab1 (Accession #BAD35163); Cry41Ba1 (Accession #HM461871); Cry41Ba2 (Accession #ZP_04099652); Cry42Aa1 (Accession #BAD35166); Cry43Aa1 (Accession #BAD15301); Cry43Aa2 (Accession #BAD95474); Cry43Ba1 (Accession #BAD15303); Cry43Ca1 (Accession #KC156676); Cry43Cb1 (Accession #KC156695); Cry43Cc1 (Accession #KC156696); Cry43-like (Accession #BAD15305); Cry44Aa (Accession #BAD08532); Cry45Aa (Accession #BAD22577); Cry46Aa (Accession #BAC79010); Cry46Aa2 (Accession #BAG68906); Cry46Ab (Accession #BAD35170); Cry47 Aa (Accession #AAY24695); Cry48Aa (Accession #CAJ18351); Cry48Aa2 (Accession #CAJ86545); Cry48Aa3 (Accession #CAJ86546); Cry48Ab (Accession #CAJ86548); Cry48Ab2 (Accession #CAJ86549); Cry49Aa (Accession #CAH56541); Cry49Aa2 (Accession #CAJ86541); Cry49Aa3 (Accession #CAJ86543); Cry49Aa4 (Accession #CAJ86544); Cry49Ab1 (Accession #CAJ86542); Cry50Aa1 (Accession #BAE86999); Cry50Ba1 (Accession #GU446675); Cry50Ba2 (Accession #GU446676); Cry51Aa1 (Accession #AB114444); Cry51Aa2 (Accession #GU570697); Cry52Aa1 (Accession #EF613489); Cry52Ba1 (Accession #FJ361760); Cry53Aa1 (Accession #EF633476); Cry53Ab1 (Accession #FJ361759); Cry54Aa1 (Accession #ACA52194); Cry54Aa2 (Accession #GQ140349); Cry54Ba1 (Accession #GU446677); Cry55Aa1 (Accession #ABW88932); Cry54Ab1 (Accession #JQ916908); Cry55Aa2 (Accession #AAE33526); Cry56Aa1 (Accession #ACU57499); Cry56Aa2 (Accession #GQ483512); Cry56Aa3 (Accession #JX025567); Cry57Aa1 (Accession #ANC87261); Cry58Aa1 (Accession #ANC87260); Cry59Ba1 (Accession #JN790647); Cry59Aa1 (Accession #ACR43758); Cry60Aa1 (Accession #ACU24782); Cry60Aa2 (Accession #EA057254); Cry60Aa3 (Accession #EEM99278); Cry60Ba1 (Accession #GU810818); Cry60Ba2 (Accession #EA057253); Cry60Ba3 (Accession #EEM99279); Cry61Aa1 (Accession #HM035087); Cry61Aa2 (Accession #HM132125); Cry61Aa3 (Accession #EEM19308); Cry62Aa1 (Accession #HM054509); Cry63Aa1 (Accession #BA144028); Cry64Aa1 (Accession #BAJ05397); Cry65Aa1 (Accession #HM461868); Cry65Aa2 (Accession #ZP_04123838); Cry66Aa1 (Accession #HM485581); Cry66Aa2 (Accession #ZP_04099945); Cry67Aa1 (Accession #HM485582); Cry67Aa2 (Accession #ZP_04148882); Cry68Aa1 (Accession #HQ113114); Cry69Aa1 (Accession #HQ401006); Cry69Aa2 (Accession #JQ821388); Cry69Ab1 (Accession #JN209957); Cry70Aa1 (Accession #JN646781); Cry70Ba1 (Accession #AD051070); Cry70Bb1 (Accession #EEL67276); Cry71Aa1 (Accession #JX025568); Cry72Aa1 (Accession #JX025569); Cyt1Aa (GenBank Accession Number X03182); Cyt1Ab (GenBank Accession Number X98793); Cyt1B (GenBank Accession Number U37196); Cyt2A (GenBank Accession Number Z14147); and Cyt2B (GenBank Accession Number U52043).

[0366] Examples of δ-endotoxins also include but are not limited to Cry1A proteins of U.S. Pat. Nos. 5,880,275, 7,858,849 8,530,411, 8,575,433, and 8,686,233; a DIG-3 or DIG-11 toxin (N-terminal deletion of a-helix 1 and/or a-helix 2 variants of cry proteins such as Cry1A, Cry3A) of U.S. Pat. Nos. 8,304,604, 8,304,605 and 8,476,226; Cry1B of U.S. patent application Ser. No. 10/525,318; Cry1C of U.S. Pat. No. 6,033,874; Cry1F of U.S. Pat. Nos. 5,188,960 and 6,218,188; Cry1A/F chimeras of U.S. Pat. Nos. 7,070,982; 6,962,705 and 6,713,063); a Cry2 protein such as Cry2Ab protein of U.S. Pat. No. 7,064,249); a Cry3A protein including but not limited to an engineered hybrid insecticidal protein (eHIP) created by fusing unique combinations of variable regions and conserved blocks of at least two different Cry proteins (US Patent Application Publication Number 2010/0017914); a Cry4 protein; a Cry5 protein; a Cry6 protein; Cry8 proteins of U.S. Pat. Nos. 7,329,736, 7,449,552, 7,803,943, 7,476,781, 7,105,332, 7,378,499 and 7,462,760; a Cry9 protein such as such as members of the Cry9A, Cry9B, Cry9C, Cry9D, Cry9E and Cry9F families, including but not limited to the Cry9D protein of U.S. Pat. No. 8,802,933 and the Cry9B protein of U.S. Pat. No. 8,802,934; a Cry15 protein of Naimov, et al., (2008), “Applied and Environmental Microbiology,” 74:7145-7151; a Cry22, a Cry34Ab1 protein of U.S. Pat. Nos. 6,127,180, 6,624,145 and 6,340,593; a CryET33 and cryET34 protein of U.S. Pat. Nos. 6,248,535, 6,326,351, 6,399,330, 6,949,626, 7,385,107 and 7,504,229; a CryET33 and CryET34 homologs of US Patent Publication Number 2006/0191034, 2012/0278954, and PCT Publication Number WO 2012/139004; a Cry35Ab1 protein of U.S. Pat. Nos. 6,083,499, 6,548,291 and 6,340,593; a Cry46 protein, a Cry 51 protein, a Cry binary toxin; a TIC901 or related toxin; TIC807 of US Patent Application Publication Number 2008/0295207; ET29, ET37, TIC809, TIC810, TIC812, TIC127, TIC128 of PCT US 2006/033867; TIC853 toxins of U.S. Pat. No. 8,513,494, AXMI-027, AXMI-036, and AXMI-038 of U.S. Pat. No. 8,236,757; AXMI-031, AXMI-039, AXMI-040, AXMI-049 of U.S. Pat. No. 7,923,602; AXMI-018, AXMI-020 and AXMI-021 of WO 2006/083891; AXMI-010 of WO 2005/038032; AXMI-003 of WO 2005/021585; AXMI-008 of US Patent Application Publication Number 2004/0250311; AXMI-006 of US Patent Application Publication Number 2004/0216186; AXMI-007 of US Patent Applica-tion Publication Number 2004/0210965; AXMI-009 of US Patent Application Number 2004/0210964; AXMI-014 of US Patent Application Publication Number 2004/0197917; AXMI-004 of US Patent Application Publication Number 2004/0197916; AXMI-028 and AXMI-029 of WO 2006/119457; AXMI-007, AXMI-008, AXMI-0080rf2, AXMI-009, AXMI-014 and AXMI-004 of WO 2004/074462; AXMI-150 of U.S. Pat. No. 8,084,416; AXMI-205 of US Patent Application Publication Number 2011/0023184; AXMI-011, AXMI-012, AXMI-013, AXMI-015, AXMI-019, AXMI-044, AXMI-037, AXMI-043, AXMI-033, AXMI-034, AXMI-022, AXMI-023, AXMI-041, AXMI-063 and AXMI-064 of US Patent Application Publication Number 2011/0263488; AXMI-R1 and related proteins of US Patent Application Publication Number 2010/0197592; AXMI221Z, AXMI222z, AXMI223z, AXMI224z and AXMI225z of WO 2011/103248; AXMI218, AXMI219, AXMI220, AXMI226, AXMI227, AXMI228, AXMI229, AXMI230 and AXMI231 of WO 2011/103247 and U.S. Pat. No. 8,759,619; AXMI-115, AXMI-113, AXMI-005, AXMI-163 and AXMI-184 of U.S. Pat. No. 8,334,431; AXMI-001, AXMI-002, AXMI-030, AXMI-035 and AXMI-045 of US Patent Application Publication Number 2010/0298211; AXMI-066 and AXMI-076 of US Patent Application Publication Number 2009/0144852; AXMI128, AXMI130, AXMI131, AXMI133, AXMI140, AXMI141, AXMI142, AXMI143, AXMI144, AXMI146, AXMI148, AXMI149, AXMI152, AXMI153, AXMI154, AXMI155, AXMI156, AXMI157, AXMI158, AXMI162, AXMI165, AXMI166, AXMI167, AXMI168, AXMI169, AXMI170, AXMI171, AXMI172, AXMI173, AXMI174, AXMI175, AXMI176, AXMI177, AXMI178, AXMI179, AXMI180, AXMI181, AXMI182, AXMI185, AXMI186, AXMI187, AXMI188, AXMI189 of U.S. Pat. No. 8,318,900; AXMI079, AXMI080, AXMI081, AXMI082, AXMI091, AXMI092, AXMI096, AXMI097, AXMI098, AXMI099, AXMI100, AXMI101, AXMI102, AXMI103, AXMI104, AXMI107, AXMI108, AXMI109, AXMI110, AXMI111, AXMI112, AXMI114, AXMI116, AXMI117, AXMI118, AXMI119, AXMI120, AXMI121, AXMI122, AXMI123, AXMI124, AXMI1257, AXMI1268, AXMI127, AXMI129, AXMI164, AXMI151, AXMI161, AXMI183, AXMI132, AXMI138, AXMI137 of US Patent Application Publication Number 2010/0005543, AXMI270 of US Patent Application Publication US20140223598, AXMI279 of US Patent Application Publication US20140223599, cry proteins such as Cry1A and Cry3A having modified proteolytic sites of U.S. Pat. No. 8,319,019; a Cry1Ac, Cry2Aa and Cry1 Ca toxin protein from Bacillus thuringiensis strain VBTS 2528 of US Patent Application Publication Number 2011/0064710. Other Cry proteins are well known to one skilled in the art. See, N. Crickmore, et al., “Revision of the Nomenclature for the Bacillus thuringiensis Pesticidal Crystal Proteins,” Microbiology and Molecular Biology Reviews,” (1998) Vol 62: 807-813; see also, N. Crickmore, et al., “Bacillus thuringiensis toxin nomenclature” (2016), at www.btnomenclature.info/.

[0367] The use of Cry proteins as transgenic plant traits is well known to one skilled in the art and Cry-transgenic plants including but not limited to plants expressing Cry1Ac, Cry1Ac+Cry2Ab, Cry1Ab, Cry1A.105, Cry1F, Cry1Fa2, Cry1F+Cry1Ac, Cry2Ab, Cry3A, mCry3A, Cry3Bb1, Cry34Ab1, Cry35Ab1, Vip3A, mCry3A, Cry9c and CBI-Bt have received regulatory approval. See, Sanahuja et al., “Bacillus thuringiensis: a century of research, development and commercial applications,” (2011) Plant Biotech Journal, April 9(3):283-300 and the CERA (2010) GM Crop Database Center for Environmental Risk Assessment (CERA), ILSI Research Foundation, Washington D.C. at cera-gmc.org/index.php?action=gm_crop_database, which can be accessed on the world-wide web using the “www” prefix). More than one pesticidal proteins well known to one skilled in the art can also be expressed in plants such as Vip3Ab & Cry1Fa (US2012/0317682); Cry1BE & Cry1F (US2012/0311746); Cry1CA & Cry1AB (US2012/0311745); Cry1F & CryCa (US2012/0317681); Cry1DA& Cry1BE (US2012/0331590); Cry1DA & Cry1Fa (US2012/0331589); Cry1AB & Cry1BE (US2012/0324606); Cry1Fa & Cry2Aa and Cry11 & Cry1E (US2012/0324605); Cry34Ab/35Ab and Cry6Aa (US20130167269); Cry34Ab/VCry35Ab & Cry3Aa (US20130167268); Cry1Ab & Cry1F (US20140182018); and Cry3A and Cry1Ab or Vip3Aa (US20130116170). Pesticidal proteins also include insecticidal lipases including lipid acyl hydrolases of U.S. Pat. No. 7,491,869, and cholesterol oxidases such as from Streptomyces (Purcell et al. (1993) Biochem Biophys Res Commun 15:1406-1413).

[0368] Pesticidal proteins also include VIP (vegetative insecticidal proteins) toxins. Entomopathogenic bacteria produce insecticidal proteins that accumulate in inclusion bodies or parasporal crystals (such as the aforementioned Cry and Cyt proteins), as well as insecticidal proteins that are secreted into the culture medium. Among the latter are the Vip proteins, which are divided into four families according to their amino acid identity. The Vip1 and Vip2 proteins act as binary toxins and are toxic to some members of the Coleoptera and Hemiptera. The Vip1 component is thought to bind to receptors in the membrane of the insect midgut, and the Vip2 component enters the cell, where it displays its ADP-ribosyltransferase activity against actin, preventing microfilament formation. Vip3 has no sequence similarity to Vip1 or Vip2 and is toxic to a wide variety of members of the Lepidoptera. Its mode of action has been shown to resemble that of the Cry proteins in terms of proteolytic activation, binding to the midgut epithelial membrane, and pore formation, although Vip3A proteins do not share binding sites with Cry proteins. The latter property makes them good candidates to be combined with Cry proteins in transgenic plants (Bacillus thuringiensis-treated crops [Bt crops]) to prevent or delay insect resistance and to broaden the insecticidal spectrum. There are commercially grown varieties of Bt cotton and Bt maize that express the Vip3Aa protein in combination with Cry proteins. For the most recently reported Vip4 family, no target insects have been found yet. See, Chakroun et al., “Bacterial Vegetative Insecticidal Proteins (Vip) from Entomopathogenic Bacteria,” Microbiol Mol Biol Rev. 2016 Mar. 2; 80(2):329-50. VIPs can be found in U.S. Pat. Nos. 5,877,012, 6,107,279 6,137,033, 7,244,820, 7,615,686, and 8,237,020 and the like. Other VIP proteins are well known to one skilled in the art (see, lifesci.sussex.ac.uk/home/Neil_Crickmore/Bt/vip.html, which can be accessed on the world-wide web using the “www” prefix).

[0369] Pesticidal proteins also include toxin complex (TC) proteins, obtainable from organisms such as Xenorhabdus, Photorhabdus and Paenibacillus (see, U.S. Pat. Nos. 7,491,698 and 8,084,418). Some TC proteins have “stand alone” insecticidal activity and other TC proteins enhance the activity of the stand-alone toxins produced by the same given organism. The toxicity of a “stand-alone” TC protein (from Photorhabdus, Xenorhabdus or Paenibacillus, for example) can be enhanced by one or more TC protein “potentiators” derived from a source organism of a different genus. There are three main types of TC proteins. As referred to herein, Class A proteins (“Protein A”) are stand-alone toxins. Class B proteins (“Protein B”) and Class C proteins (“Protein C”) enhance the toxicity of Class A proteins. Examples of Class A proteins are TcbA, TcdA, XptA1 and XptA2. Examples of Class B proteins are TcaC, TcdB, XptB1Xb and XptC1 Wi. Examples of Class C proteins are TccC, XptC1Xb and XptB1 Wi. Pesticidal proteins also include spider, snake and scorpion venom proteins. Examples of spider venom peptides include, but are not limited to lycotoxin-1 peptides and mutants thereof (U.S. Pat. No. 8,334,366).

[0370] Some currently registered PIPs are listed in Table 11. Transgenic plants have also been engineered to express dsRNA directed against insect genes (Baum, J. A. et al. (2007) Control of coleopteran insect pests through RNA interference. Nature Biotechnology 25: 1322-1326; Mao, Y. B. et al. (2007) Silencing a cotton bollworm P450 monooxygenase gene by plant-mediated RNAi impairs larval tolerance of gossypol. Nature Biotechnology 25: 1307-1313). RNA interference can be triggered in the pest by feeding of the pest on the transgenic plant. Pest feeding thus causes injury or death to the pest.

TABLE 11
List of exemplary Plant-incorporated Protectants, which
can be combined with microbes of the disclosure

| Plant-Incorporated | Company and Trade | Pesticide Registration |
|---|---|---|
| Protectants (PIPs) | Names | Numbers |
| Potato | Potato | |
| Cry3A Potato PC Code 006432 | Naturemark | 524-474 |
| | New Leaf Monsanto | |
| Cry3A & PLRV Potato | Monsanto | 524-498 |
| PC Codes 006432, 006469 | New Leaf Plus | |
| Corn | | |
| Cry1Ab Corn Event 176 PC Code 006458 | Mycogen Seeds/Dow | 68467-1 |
| | Agro | 66736-1 |
| | Syngenta Seeds | |
| Cry1Ab Corn Event Bt11 EPA PC Code | Agrisure CB (with | 67979-1 |
| 006444 OECD Unique Identifier SYN- | Yieldgard) | 65268-1 |
| BTØ11-1, | Attribute Insect | |
| | Protected Sweet Corn | |
| | Syngenta Seeds | |
| Cry1Ab Corn Event MON 801 | Monsanto | 524-492 |
| Cry1Ab corn Event MON 810 PC Code | Monsanto | 524-489 |
| 006430 OECD Unique Identifier MON- | | |
| ØØ81Ø-6 | | |
| Cry1Ac Corn PC Code 006463 | Dekalb Genetics c/o | 69575-2 |
| | Monsanto | |
| | BT-XTRA | |
| Cry1F corn Event TC1507 PC Code | Mycogen Seeds/Dow | 68467-2 |
| 006481 OECD Unique Identifier DAS- | Agro | 29964-3 |
| Ø15Ø7-1 | Pioneer Hi- | |
| | Bred/Dupont | |
| moCry1F corn Event DAS-Ø6275-8 PC | Mycogen Seeds/Dow | 68467-4 |
| Code 006491 OECD Unique Identifier | Agro | |
| DAS-Ø6275-8 | | |
| Cry9C Corn | Aventis | 264-669 |
| | StarLink | |
| Cry3Bb1 corn Event MON863 PC Code | Monsanto | 524-528 |
| 006484 | YielGard RW | |
| OECD Unique Identifier MON-ØØ863-5 | | |
| Cry3Bb1 corn Event MON 88017 PC Code | Monsanto | 524-551 |
| 006498 | YieldGrad VT | |
| OECD Unique Identifier MON-88Ø17-3 | Rootworm | |
| Cry34Ab1/Cry35Ab1 corn Event DAS- | Mycogen Seeds/Dow | 68467-5 |
| 591227-7 | Agro | 29964-4 |
| PC Code 006490 | Pioneer Hi- | |
| OECD Unique Identifier DAS-59122-7 | Bred/Dupont Herculex | |
| | Rootworm | |
| Cry34Ab1/Cry35Ab1 and Cry1F corn | Pioneer Hi- | 29964-17 |
| Event 4114 | Bred/Dupont | |
| PC Codes 006555, 006556 | | |
| mCry3A corn Event MIR 604 | Syngenta Seeds | 67979-5 |
| PC Code 006509 OECD Unique Identifier | Agrisure RW | |
| SYN-IR604-8 | | |
| Cry1A.105 and Cry2Ab2 corn Event MON | Monsanto | 524-575 |
| 89034 PC Codes 006515 and 006514 | Genuity VT Double Pro | |
| Vip3Aa20 corn Event MIR 162 | Syngenta Seeds | 67979-14 |
| PC Code 006599 OECD Unique Identifier | Agrisure Viptera | |
| SYN-IR162-4 | | |
| eCry3.1Ab corn in Event 5307 PC Code | Syngenta | 67979-22 |
| 016483 OECD Unique Identifier SYN- | | |
| Æ53Æ7-1 | | |
| Stacked Events and Seed Blend Corn | | |
| MON863 × MON810 with Cry3Bb1 + | Monsanto YieldGard | 524-545 |
| Cry1Ab | Plus | |
| DAS-59122-7 × TC1507 with | Mycogen Seeds/Dow | 68467-6 |
| Cry34Ab1/Cry35Ab1 + Cry1F | Agro Pioneer Hi- | 29964-5 |
| | Bred/Dupont | |
| | Herculex Xtra | |
| MON 88017 × MON 810 with Cry1AB + | Monsanto | 524-552 |
| Cry3Bb | YieldGard VT Triple | |
| | YieldGard VT Plus | |
| MIR 604 × Bt11 with mCry3A + Cry1Ab | Syngenta | 67979-8 |
| | Agrisure CB/RW | |
| | Agrisure 3000GT | |
| Mon 89034 × Mon 88017 with Cry1A.105 + | Monsanto | 524-576 |
| Cry2Ab2 + Cry3Bb1 | Genuity VT Triple PRO | |
| Bt11 × MIR 162 with Cry1Ab + Vip3Aa 20 | Syngenta Seeds | 67979-12 |
| | Agrisure 2100 | |
| Bt11 × MIR 162 × MIR 604 with Cry1Ab + | Syngenta Seeds | 67979-13 |
| Vip3Aa20 + mCry3A | Agrisure 3100 | |
| MON 89034 × TC1507 × MON 88017 × | Monsanto Company | 524-581 |
| DAS-59122-7 with Cry1A.105 + Cry2Ab2 + | Mycogen Seeds/Dow | 68467-7 |
| Cry1F + Cry3Bb1 + | Agro | |
| Cry34Ab1/Cry35Ab1 | Genuity SmartStax | |
| | SmartStax | |
| MON 89034 × TC1507 x MON 88017 × | Monsanto Company | 524-595 |
| DAS-59122-7 Seed Blend | Mycogen Seeds/Dow | 68467-16 |
| | Agro | |
| | Genuity SmartStax RIB | |
| | Complete | |
| | SmartStax Refuge | |
| | Advanced; Refuge | |
| | Advanced Powered by | |
| | SmartStax | |
| Seed Blend of Herculex Xtra + Herculex I | Pioneer Hi- | 29964-6 |
| | Bred/Dupont | |
| | Optimum AcreMax1 | |
| | Insect Protection | |
| Seed Blend of Herculex RW + Non-Bt corn | Pioneer Hi- | 29964-10 |
| | Bred/Dupont | |
| | Optimum AcreMax RW | |
| (Cry1F × Cry34/35 × Cry1Ab) − seed blend | Pioneer Hi- | 29964-11 |
| | Bred/Dupont | |
| | Optimum AcreMax | |
| | Xtra | |
| (Cry1F × Cry1Ab) − seed blend | Pioneer Hi- | 29964-12 |
| | Bred/Dupont | |
| | Optimum AcreMax | |
| | Insect Protection | |
| (Cry1F × mCry3A) | Pioneer Hi- | 29964-13 |
| | Bred/Dupont | |
| | Optimum Trisect | |
| (Cry1F × Cry34/35 × Cry1Ab × mCry3A) | Pioneer Hi- | 29964-14 |
| | Bred/Dupont | |
| | Optimum Intrasect | |
| | Xtreme | |
| 59122 × MON 810 × MIR 604 (Cry34/35 × | Pioneer Hi- | 29964-15 |
| Cry1Ab × mCry3A) | Bred/Dupont | |
| Optimum AcreMax Xtreme (Cry1F × | Pioneer Hi- | 29964-16 |
| Cry34/35 × Cry1Ab × mCry3A) − seed | Bred/Dupont | |
| blend | Optimum AcreMax | |
| | Xtreme (seed blend) | |
| MON 810 × MIR 604 (Cry1Ab × mCry3A) | Pioneer Hi- | 29964-18 |
| | Bred/Dupont | |
| 1507 × MON810 × MIR 162 (Cry1F × | Pioneer Hi- | 29964-19 |
| Cry1Ab × Vip 3Aa20) | Bred/Dupont | |
| | Optimum Intrasect | |
| | Leptra | |
| 1507 × MIR 162 (Cry1F × Vip30Aa20) | Pioneer Hi- | 29964-20 |
| | Bred/Dupont | |
| 4114 × MON 810 × MIR 604 (Cry34/35 × | Pioneer Hi- | 29964-21 |
| Cry1F × Cry1Ab × mCry3A) − seed blend | Bred/Dupont | |
| 4114 × MON 810 × MIR 604 (Cry34/35 × | Pioneer Hi- | 29964-22 |
| Cry1F × Cry1Ab × mCry3A) | Bred/Dupont | |
| 1507 × MON810 × MIR 604 (Cry1F × | Pioneer Hi- | 29964-23 |
| Cry1Ab × mCry3A) − seed blend | Bred/Dupont | |
| | Optimum AcreMax | |
| | Trisect | |
| 1507 × MON810 × MIR 604 (Cry1F × | Pioneer Hi- | 29964-24 |
| Cry1Ab × mCry3A) | Bred/Dupont | |
| | Optimum Intrasect | |
| | Trisect | |
| 4114 × MON 810 (Cry34/35 × Cry1F × | Pioneer Hi- | 29964-25 |
| Cry1Ab) | Bred/Dupont | |
| 1507 × MON810 × MIR 162 (Cry1F × | Pioneer Hi- | 29964-26 |
| Cry1Ab × Vip 3Aa20) − seed blend | Bred/Dupont | |
| | Optimum AcreMax | |
| | Leptra | |
| SmartStax Intermediates (8 products) | Monsanto | 524-583, 524-584, 524- |
| | | 586, 524-587, 524- |
| | | 588, 524-589, 524-590 |
| MON 89034 × 1507 (Cry1A.105 × | Monsanto | 524-585 |
| Cry2Ab2 × Cry1F) | Genuity Power-Core | |
| MON 89034 (Cry1A.105 × Cry2Ab2) − | Monsanto | 524-597 |
| seed blend | Genuity VT Double | |
| | PRO RIB Complete | |
| MON 89034 × 88017 RIB Complete | Monsanto | 524-606 |
| (Cry1A.105 × Cry2Ab2 × Cry3Bb1) − seed | Genuity VT Triple PRO | |
| blend | RIB Complete | |
| MON 89034 × 1507 (Cry1A.105 × | Monsanto | 524-612 |
| Cry2Ab2 × Cry1F) − seed blend | Genuity PowerCore | |
| | RIB Complete | |
| Bt11 × MIR162 × 1507 (Cry1Ab × | Syngenta Seeds | 67979-15 |
| Vip3Aa20 × Cry1F) | Agrisure Viptera 3220 | |
| | Refuge Renew | |
| Bt11 × 59122-7 × MIR 604 × 1507 (Cry1Ab × | Syngenta Seeds | 67979-17 |
| Cry34/35 × mCry3A × Cry1F) | Agrisure 3122 | |
| Bt11 × MIR162 × TC1507 (Cry1Ab × | Syngenta Seeds | 67979-19 |
| Vip3Aa20 × Cry1F) − seed blend | Agisure Viptera 3220 | |
| | (E-Z Refuge) (Refuge | |
| | Advanced) | |
| Bt11 × DAS 59122-7 × MIR604 × TC1507 | Syngenta Seeds | 67979-20 |
| (Cry1Ab × Cry34/35 × mCry3A × Cry1F) − | Agisure Viptera 3122 | |
| seed blend | (E-Z Refuge) (Refuge | |
| | Advanced) | |
| Bt11 × MIR 162 × MIR 604 × TC1507 × | Syngenta Seeds | 67979-23 |
| 5307 (Cry1Ab × Vip3Aa20 × mCry3A × | Agrisure Duracade | |
| Cry1F × eCry3.1Ab) | (Refuge Renew) 5222 | |
| Bt11 × MIR 604 × TC1507 × 5307 (Cry1Ab × | Syngenta Seeds | 67979-24 |
| mCry3A × Cry1F × eCry3.1Ab) | Agrisure Duracade | |
| | (Refuge Renew) 5122 | |
| Bt11 × MIR 604 × TC1507 × 5307 (Cry1Ab × | Syngenta Seeds | 67979-25 |
| mCry3A × Cry1F × eCry3.1Ab) − seed | Agisure Duracade 5122 | |
| blend | E-Z Refuge | |
| Bt11 × MIR 162 × MIR 604 × TC1507 × | Syngenta Seeds | 67979-26 |
| 5307 (Cry1Ab × Vip3Aa20 × mCry3A × | Agisure Duracade 5222 | |
| Cry1F × eCry3.1Ab) − seed blend | E-Z Refuge | |
| Bt11 × MIR 162 × MIR 604 × TC1507 × | Syngenta Seeds | 67979-27 |
| 5307 (Cry1Ab × Vip3Aa20 x mCry3A × | Agrisure Duracade | |
| Cry1F × eCry3.1Ab) | (Refuge Renew) 5022 | |
| MIR604 × DAS-59122-7 × TC1507 | Syngenta Seeds | 67979-29 |
| (mCry3A × Cry34/35 x Cry1F) | | |
| SmartStax Intermediates (8 products) | Mycogen Seeds/Dow | 68467-8, 68467-9, |
| | Agro | 68467-10, 68467-11, |
| | | 68467-13, 68467-14, |
| | | 68467-15 |
| MON 89034 × 1507 (Cry1A.105 × | Mycogen Seeds/Dow | 68467-12 |
| Cry2Ab2 × Cry1F) | Agro | |
| | PowerCore; | |
| | PowerCore Enlist | |
| MON 89034 × 1507 (Cry1A.105 × | Mycogen Seeds/Dow | 68467-21 |
| Cry2Ab2 × Cry1F) − seed blend | Agro | |
| | PowerCore Refuge | |
| | Advanced; Refuge | |
| | Advanced Powered by | |
| | PowerCore | |
| 1507 × MON 810 | Pioneer Hi- | 29964-7 |
| | Bred/Dupont | |
| | Optimum Intrasect | |
| 59122 × 1507 × MON 810 | Pioneer Hi- | 29964-8 |
| | Bred/Dupont | |
| 59122 × MON 810 | Pioneer Hi- | 29964-9 |
| | Bred/Dupont | |
| Cotton | | |
| Cry1Ac Cotton | Monsanto | 524-478 |
| | BollGard | |
| Cry1Ac and Cry2Ab2 in Event 15985 | Monsanto | 524-522 |
| Cotton PC Codes 006445, 006487 | BollGard II | |
| Bt cotton Event MON531 with Cry1Ac | Monsanto | 524-555 |
| (breeding nursery use only) | | |
| Bt cotton Event MON15947 with Cry2Ab2 | Monsanto | 524-556 |
| (breeding nursery use only) | | |
| COT102 × MON 15985 (Vip3Aa19 × | Monsanto | 524-613 |
| Cry1Ac × Cry2Ab2) | Bollgard III | |
| Cry1F and Cry1Ac (Events DAS-21023-5 × | Mycogen Seeds/Dow | 68467-3 |
| DAS-24236-5) Cotton PC Codes 006512, | Agro | |
| 006513 | Widestrike | |
| Event 3006-210-23 (Cry1Ac) | Mycogen Seeds/Dow | 68467-17 |
| | Agro | |
| Event 281-24-236 (Cry1F) | Mycogen Seeds/Dow | 68467-18 |
| | Agro | |
| WideStrike × COT102 (Cry1F × Cry1Ac × | Mycogen Seeds/Dow | 68467-19 |
| Vip3Aa19) | Agro | |
| | WideStrike 3 | |
| Vip3Aa19 and FLCry1Ab (Events | Syngenta Seeds | 67979-9 |
| Cot102 × Cot67B) Cotton PC Codes 016484, | (Formally VipCot) | |
| 016486 OECD Unique Identifier SYN- | | |
| IR102-7 X SYN-IR67B-1 | | |
| COT102 (Vip3Aa19) | Syngenta Seeds | 67979-18 |
| COT67B (FLCry1Ab) | Syngenta Seeds | 67979-21 |
| T304-40 (Cry1Ab) | Bayer CropScience | 264-1094 |
| GHB119 (Cry2Ae) | Bayer CropScience | 264-1095 |
| T304-40 × GHB119 (Cry1Ab × Cry2Ae) | Bayer CropScience | 264-1096 |
| OECD Unique Identifier: BCS-GHØØ4-7 × | TwinLink | |
| BCS-GHØØ5-8 | | |
| Soybean | | |
| Cry1Ac in Event 87701 Soybean PC Code | Monsanto | 524-594 |
| 006532 OECD Unique Identifier | Inacta | |
| Cry1A.105 and Cry2Ab2 in Event 87751 | Monsanto | 524-619 |
| Soybean PC Codes 006614, 006615 OECD | | |
| Unique Identifier MON-87751-7 | | |
| Cry1Ac × Cry1F in Event DAS 81419 | Mycogen Seeds/Dow | 68467-20 |
| Soybean PC Codes 006527, 006528 OECD | Agro | |
| Unique Identifier | | |
| DAS 81419 (Cry1Ac × Cry1F) | | |

[0371] In some embodiments, any one or more of the pesticides set forth herein may be utilized with any one or more of the microbes of the disclosure and can be applied to plants or parts thereof, including seeds.

### Herbicides

[0372] As aforementioned, agricultural compositions of the disclosure, which may comprise any microbe taught herein, are sometimes combined with one or more herbicides.

[0373] Compositions comprising bacteria or bacterial populations produced according to methods described herein and/or having characteristics as described herein may further include one or more herbicides. In some embodiments, herbicidal compositions are applied to the plants and/or plant parts. In some embodiments, herbicidal compositions may be included in the compositions set forth herein, and can be applied to a plant(s) or a part(s) thereof simultaneously or in succession, with other compounds.

[0374] Herbicides include 2,4-D, 2,4-DB, acetochlor, acifluorfen, alachlor, ametryn, atrazine, aminopyralid, benefin, bensulfuron, bensulide, bentazon, bicyclopyrone, bromacil, bromoxynil, butylate, carfentrazone, chlorimuron, chlorsulfuron, clethodim, clomazone, clopyralid, cloransulam, cycloate, DCPA, desmedipham, dicamba, dichlobenil, diclofop, diclosulam, diflufenzopyr, dimethenamid, diquat, diuron, DSMA, endothall, EPTC, ethalfluralin, ethofumesate, fenoxaprop, fluazifop-P, flucarbzone, flufenacet, flumetsulam, flumiclorac, flumioxazin, fluometuron, fluroxypyr, fomesafen, foramsulfuron, glufosinate, glyphosate, halosulfuron, hexazinone, imazamethabenz, imazamox, imazapic, imazaquin, imazethapyr, isoxaflutole, lactofen, linuron, MCPA, MCPB, mesotrione, metolachlor-s, metribuzin, indaziflam, metsulfuron, molinate, MSMA, napropamide, naptalam, nicosulfuron, norflurazon, oryzalin, oxadiazon, oxyfluorfen, paraquat, pelargonic acid, pendimethalin, phenmedipham, picloram, primisulfuron, prodiamine, prometryn, pronamide, propanil, prosulfuron, pyrazon, pyrithioac, quinclorac, quizalofop, rimsulfuron, S-metolachlor, sethoxydim, siduron, simazine, sulfentrazone, sulfometuron, sulfosulfuron, tebuthiuron, tembotrione, terbacil, thiazopyr, thifensulfuron, thiobencarb, topramezone, tralkoxydim, triallate, triasulfuron, tribenuron, triclopyr, trifluralin, and triflusulfuron.

[0375] In some embodiments, any one or more of the herbicides set forth herein may be utilized with any one or more of the plants or parts thereof set forth herein.

[0376] Herbicidal products may include CORVUS, BALANCE FLEXX, CAPRENO, DIFLEXX, LIBERTY, LAUDIS, AUTUMN SUPER, and DIFLEXX DUO.

[0377] In some embodiments, any one or more of the herbicides set forth in the below Table 12 may be utilized with any one or more of the microbes taught herein, and can be applied to any one or more of the plants or parts thereof set forth herein.

TABLE 12
List of exemplary herbicides, which can be combined with microbes of the disclosure

| | Herbicide | | |
|---|---|---|---|
| Site of Action | Group Number | Chemical Family | Herbicide |
| ACCase | 1 | Cyclohexanediones | Sethoxydim (Poast, |
| inhibitors | | | Poast Plus) |
| | | | Clethodim (Select, |
| | | | Select Max, Arrow) |
| | | Aryloxyphenoxypropionates | Fluazifop (Fusilade DX, |
| | | | component in Fusion) |
| | | | Fenoxaprop (Puma, |
| | | | component in Fusion) |
| | | | Quizalofop (Assure II, |
| | | | Targa) |
| | | Phenylpyrazolins | Pinoxaden (Axial XL) |
| ALS inhibitors | 2 | Imidazolinones | Imazethapyr (Pursuit) |
| | | | Imazamox (Raptor) |
| | | Sulfonylureas | Chlorimuron (Classic) |
| | | | Halosulfuron (Permit, |
| | | | Sandea) |
| | | | Iodosulfuron |
| | | | (component in Autumn |
| | | | Super) |
| | | | Mesosulfuron (Osprey) |
| | | | Nicosulfuron (Accent Q) |
| | | | Primisulfuron (Beacon) |
| | | | Prosulfuron (Peak) |
| | | | Rimsulfuron (Matrix, |
| | | | Resolve) |
| | | | Thifensulfuron |
| | | | (Harmony) |
| | | | Tribenuron (Express) |
| | | | Triflusulfuron (UpBeet) |
| | | Triazolopyrimidine | Flumetsulam (Python) |
| | | | Cloransulam-methyl |
| | | | (FirstRate) |
| | | | Pyroxsulam (PowerFlex |
| | | | HL) |
| | | | Florasulam (component |
| | | | in Quelex) |
| | | Sulfonylaminocarbonyltriazolinones | Propoxycarbazone |
| | | | (Olympus) |
| | | | Thiencarbazone-methyl |
| | | | (component in |
| | | | Capreno) |
| Microtubule | 3 | Dinitroanilines | Trifluralin (many |
| inhibitors (root | | | names) |
| inhibitors) | | | Ethalfluralin (Sonalan) |
| | | | Pendimethalin |
| | | | (Prowl/Prowl H₂O) |
| | | Benzamide | Pronamide (Kerb) |
| Synthetic auxins | 4 | Arylpicolinate | Halauxifen (Elevore, |
| | | | component in Quelex) |
| | | Phenoxy acetic acids | 2,4-D (Enlist One, |
| | | | others) |
| | | | 2,4-DB (Butyrac 200, |
| | | | Butoxone 200) |
| | | | MCPA |
| | | Benzoic acids | Dicamba (Banvel, |
| | | | Clarity, DiFlexx, |
| | | | Eugenia, XtendiMax; |
| | | | component in Status) |
| | | Pyridines | Clopyralid (Stinger) |
| | | | Fluroxypyr (Starane |
| | | | Ultra) |
| Photosystem II | 5 | Triazines | Atrazine |
| inhibitors | | | Simazine (Princep, Sim- |
| | | | Trol) |
| | | Triazinone | Metribuzin (Metribuzin, |
| | | | others) |
| | | | Hexazinone (Velpar) |
| | | Phenyl-carbamates | Desmedipham (Betenex) |
| | | | Phenmedipham |
| | | | (component in Betamix) |
| | | Uracils | Terbacil (Sinbar) |
| | 6 | Benzothiadiazoles | Bentazon (Basagran, |
| | | | others) |
| | | Nitriles | Bromoxynil (Buctril, |
| | | | Moxy, others) |
| | 7 | Phenylureas | Linuron (Lorox, Linex) |
| Lipid synthesis | 8 | Thiocarbamates | EPTC (Eptam) |
| inhibitor | | | |
| EPSPS inhibitor | 9 | Organophosphorus | Glyphosate |
| Glutamine | 10 | Organophosphorus | Glufosinate (Liberty, |
| synthetase | | | Rely) |
| inhibitor | | | |
| Diterpene | 13 | Isoxazolidinone | Clomazone (Command) |
| biosynthesis | | | |
| inhibitor | | | |
| (bleaching) | | | |
| Protoporphyrinogen | 14 | Diphenylether | Acifluorfen (Ultra |
| oxidase | | | Blazer) |
| inhibitors (PPO) | | | Fomesafen (Flexstar, |
| | | | Reflex) |
| | | | Lactofen (Cobra, |
| | | | Phoenix) |
| | | N-phenylphthalimide | Flumiclorac (Resource) |
| | | | Flumioxazin (Valor, |
| | | | Valor EZ, Rowel) |
| | | Aryl triazolinone | Sulfentrazone |
| | | | (Authority, Spartan) |
| | | | Carfentrazone (Aim) |
| | | | Fluthiacet-methyl |
| | | | (Cadet) |
| | | Pyrazoles | Pyraflufen-ethyl (Vida) |
| | | Pyrimidinedione | Saflufenacil (Sharpen) |
| Long-chain fatty | 15 | Acetamides | Acetochlor (Harness, |
| acid inhibitors | | | Surpass NXT, |
| | | | Breakfree NXT, |
| | | | Warrant) |
| | | | Dimethenamid-P |
| | | | (Outlook) |
| | | | Metolachlor (Parallel) |
| | | | Pyroxasulfone (Zidua, |
| | | | Zidua SC) |
| | | | s-metolachlor (Dual |
| | | | Magnum, Dual II |
| | | | Magnum, Cinch) |
| | | | Flufenacet (Define) |
| Specific site | 16 | Benzofuranes | Ethofumesate (Nortron) |
| unknown | | | |
| Auxin transport | 19 | Semicarbazone | diflufenzopyr |
| inhibitor | | | (component in Status) |
| Photosystem I | 22 | Bipyridiliums | Paraquat (Gramoxone, |
| inhibitors | | | Parazone) |
| | | | Diquat (Reglone) |
| 4-HPPD | 27 | Isoxazole | Isoxaflutole (Balance |
| inhibitors | | Pyrazole | Flexx) |
| (bleaching) | | Pyrazolone | Pyrasulfotole |
| | | Triketone | (component in Huskie) |
| | | | Topramezone |
| | | | (Armezon/Impact) |
| | | | Bicyclopyrone |
| | | | (component in Acuron) |
| | | | Mesotrione (Callisto) |
| | | | Tembotrione (Laudis) |

### Fungicides

[0378] As aforementioned, agricultural compositions of the disclosure, which may comprise any microbe taught herein, are sometimes combined with one or more fungicides.

[0379] Compositions comprising bacteria or bacterial populations produced according to methods described herein and/or having characteristics as described herein may further include one or more fungicides. In some embodiments, fungicidal compositions may be included in the compositions set forth herein, and can be applied to a plant(s) or a part(s) thereof simultaneously or in succession, with other compounds. The fungicides include azoxystrobin, captan, carboxin, ethaboxam, fludioxonil, mefenoxam, fludioxonil, thiabendazole, thiabendaz, ipconazole, mancozeb, cyazofamid, zoxamide, metalaxyl, PCNB, metaconazole, pyraclostrobin, Bacillus subtilis strain QST 713, sedaxane, thiamethoxam, fludioxonil, thiram, tolclofos-methyl, trifloxystrobin, Bacillus subtilis strain MBI 600, pyraclostrobin, fluoxastrobin, Bacillus pumilus strain QST 2808, chlorothalonil, copper, flutriafol, fluxapyroxad, mancozeb, gludioxonil, penthiopyrad, triazole, propiconaozole, prothioconazole, tebuconazole, fluoxastrobin, pyraclostrobin, picoxystrobin, qols, tetraconazole, trifloxystrobin, cyproconazole, flutriafol, SDHI, EBDCs, sedaxane, MAXIM QUATTRO (gludioxonil, mefenoxam, azoxystrobin, and thiabendaz), RAXIL (tebuconazole, prothioconazole, metalaxyl, and ethoxylated tallow alkyl amines), and benzovindiflupyr.

[0380] In some embodiments, any one or more of the fungicides set forth herein may be utilized with any one or more of the plants or parts thereof set forth herein.

### Nematicides

[0381] As aforementioned, agricultural compositions of the disclosure, which may comprise any microbe taught herein, are sometimes combined with one or more nematicides.

[0382] Compositions comprising bacteria or bacterial populations produced according to methods described herein and/or having characteristics as described herein may further include one or more nematicide. In some embodiments, nematicidal compositions may be included in the compositions set forth herein, and can be applied to a plant(s) or a part(s) thereof simultaneously or in succession, with other compounds. The nematicides may be selected from D-D, 1,3-dichloropropene, ethylene dibromide, 1,2-dibromo-3-chloropropane, methyl bromide, chloropicrin, metam sodium, dazomet, methylisothiocyanate, sodium tetrathiocarbonate, aldicarb, aldoxycarb, carbofuran, oxamyl, ethoprop, fenamiphos, cadusafos, fosthiazate, terbufos, fensulfothion, phorate, DiTera, clandosan, sincocin, methyl iodide, propargyl bromide, 2,5-dihydroxymethyl-3,4-dihydroxypyrrolidine (DMDP), any one or more of the avermectins, sodium azide, furfural, Bacillus firmus, abamectrin, thiamethoxam, fludioxonil, clothiandin, salicylic acid, and benzo-(1,2,3)-thiadiazole-7-carbothioic acid S-methyl ester.

[0383] In some embodiments, any one or more of the nematicides set forth herein may be utilized with any one or more of the plants or parts thereof set forth herein.

[0384] In some embodiments, any one or more of the nematicides, fungicides, herbicides, insecticides, and/or pesticides set forth herein may be utilized with any one or more of the plants or parts thereof set forth herein.

### Fertilizers, Nitrogen Stabilizers, and Urease Inhibitors

[0385] As aforementioned, agricultural compositions of the disclosure, which may comprise any microbe taught herein, are sometimes combined with one or more of a: fertilizer, nitrogen stabilizer, or urease inhibitor.

[0386] In some embodiments, fertilizers are used in combination with the methods and bacteria of the present disclosure. Fertilizers include anhydrous ammonia, urea, ammonium nitrate, and urea-ammonium nitrate (UAN) compositions, among many others. In some embodiments, pop-up fertilization and/or starter fertilization is used in combination with the methods and bacteria of the present disclosure.

[0387] In some embodiments, nitrogen stabilizers are used in combination with the methods and bacteria of the present disclosure. Nitrogen stabilizers include nitrapyrin, 2-chloro-6-(trichloromethyl) pyridine, N-SERVE 24, INSTINCT, dicyandiamide (DCD).

[0388] In some embodiments, urease inhibitors are used in combination with the methods and bacteria of the present disclosure. Urease inhibitors include N-(n-butyl)-thiophosphoric triamide (NBPT), AGROTAIN, AGROTAIN PLUS, and AGROTAIN PLUS SC. Further, the disclosure contemplates utilization of AGROTAIN ADVANCED 1.0, AGROTAIN DRI-MAXX, and AGROTAIN ULTRA.

[0389] Further, stabilized forms of fertilizer can be used. For example, a stabilized form of fertilizer is SUPER U, containing 46% nitrogen in a stabilized, urea-based granule, SUPERU contains urease and nitrification inhibitors to guard from denitrification, leaching, and volatilization. Stabilized and targeted foliar fertilizer such as NITAMIN may also be used herein.

[0390] Pop-up fertilizers are commonly used in corn fields. Pop-up fertilization comprises applying a few pounds of nutrients with the seed at planting. Pop-up fertilization is used to increase seedling vigor.

[0391] Slow- or controlled-release fertilizer that may be used herein entails: A fertilizer containing a plant nutrient in a form which delays its availability for plant uptake and use after application, or which extends its availability to the plant significantly longer than a reference ‘rapidly available nutrient fertilizer’ such as ammonium nitrate or urea, ammonium phosphate or potassium chloride. Such delay of initial availability or extended time of continued availability may occur by a variety of mechanisms. These include controlled water solubility of the material by semi-permeable coatings, occlusion, protein materials, or other chemical forms, by slow hydrolysis of water-soluble low molecular weight compounds, or by other unknown means.

[0392] Stabilized nitrogen fertilizer that may be used herein entails: A fertilizer to which a nitrogen stabilizer has been added. A nitrogen stabilizer is a substance added to a fertilizer which extends the time the nitrogen component of the fertilizer remains in the soil in the urea-N or ammoniacal-N form.

[0393] Nitrification inhibitor that may be used herein entails: A substance that inhibits the biological oxidation of ammoniacal-N to nitrate-N. Some examples include: (1) 2-chloro-6-(trichloromethyl-pyridine), common name Nitrapyrin, manufactured by Dow Chemical; (2) 4-amino-1,2,4-6-triazole-HCl, common name ATC, manufactured by Ishihada Industries; (3) 2,4-diamino-6-trichloro-methyltriazine, common name CI-1580, manufactured by American Cyanamid; (4) Dicyandiamide, common name DCD, manufactured by Showa Denko; (5) Thiourea, common name TU, manufactured by Nitto Ryuso; (6) 1-mercapto-1,2,4-triazole, common name MT, manufactured by Nippon; (7) 2-amino-4-chloro-6-methyl-pyramidine, common name AM, manufactured by Mitsui Toatsu; (8) 3,4-dimethylpyrazole phosphate (DMPP), from BASF; (9) 1-amide-2-thiourea (ASU), from Nitto Chemical Ind.; (10) Ammoniumthiosulphate (ATS); (11) 1H-1,2,4-triazole (HPLC); (12) 5-ethylene oxide-3-trichloro-methlyl 1,2,4-thiodiazole (Terrazole), from Olin Mathieson; (13) 3-methylpyrazole (3-MP); (14) 1-carbamoyle-3-methyl-pyrazole (CMP); (15) Neem; and (16) DMPP.

[0394] Urease inhibitor that may be used herein entails: A substance that inhibits hydrolytic action on urea by the enzyme urease. Thousands of chemicals have been evaluated as soil urease inhibitors (Kiss and Simihaian, 2002). However, only a few of the many compounds tested meet the necessary requirements of being non toxic, effective at low concentration, stable, and compatible with urea (solid and solutions), degradable in the soil and inexpensive. They can be classified according to their structures and their assumed interaction with the enzyme urease (Watson, 2000, 2005). Four main classes of urease inhibitors have been proposed: (a) reagents which interact with the sulphydryl groups (sulphydryl reagents), (b) hydroxamates, (c) agricultural crop protection chemicals, and (d) structural analogues of urea and related compounds. N-(n-Butyl) thiophosphoric triamide (NBPT), phenylphosphorodiamidate (PPD/PPDA), and hydroquinone are probably the most thoroughly studied urease inhibitors (Kiss and Simihaian, 2002). Research and practical testing has also been carried out with N-(2-nitrophenyl) phosphoric acid triamide (2-NPT) and ammonium thiosulphate (ATS). The organo-phosphorus compounds are structural analogues of urea and are some of the most effective inhibitors of urease activity, blocking the active site of the enzyme (Watson, 2005).

### Insecticidal Seed Treatments (ISTs) for Corn

[0395] Corn seed treatments normally target three spectrums of pests: nematodes, fungal seedling diseases, and insects.

[0396] Insecticide seed treatments are usually the main component of a seed treatment package. Most corn seed available today comes with a base package that includes a fungicide and insecticide. In some aspects, the insecticide options for seed treatments include PONCHO (clothianidin), CRUISER/CRUISER EXTREME (thiamethoxam) and GAUCHO (Imidacloprid). All three of these products are neonicotinoid chemistries. CRUISER and PONCHO at the 250 (0.25 mg AI/seed) rate are some of the most common base options available for corn. In some aspects, the insecticide options for treatments include CRUISER 250 thiamethoxam, CRUISER 250 (thiamethoxam) plus LUMIVIA (chlorantraniliprole), CRUISER 500 (thiamethoxam), and PONCHO VOTIVO 1250 (Clothianidin & Bacillus firmus 1-1582).

[0397] Pioneer's base insecticide seed treatment package consists of CRUISER 250 with PONCHO/VOTIVO 1250 also available. VOTIVO is a biological agent that protects against nematodes.

[0398] Monsanto's products including corn, soybeans, and cotton fall under the ACCELERON treatment umbrella. Dekalb corn seed comes standard with PONCHO 250. Producers also have the option to upgrade to PONCHO/VOTIVO, with PONCHO applied at the 500 rate.

[0399] Agrisure, Golden Harvest and Garst have a base package with a fungicide and CRUISER 250. AVICTA complete corn is also available; this includes CRUISER 500, fungicide, and nematode protection. CRUISER EXTREME is another option available as a seed treatment package, however; the amounts of CRUISER are the same as the conventional CRUISER seed treatment, i.e. 250, 500, or 1250.

[0400] Another option is to buy the minimum insecticide treatment available, and have a dealer treat the seed downstream.

[0401] Commercially available ISTs for corn are listed in the below Table 13 and can be combined with one or more of the microbes taught herein.

TABLE 13
List of exemplary seed treatments, including ISTs, which
can be combined with microbes of the disclosure

| Treatment Type | Active Ingredient(s) | Product Trade Name | Crop |
|---|---|---|---|
| F | azoxystrobin | DYNASTY | Corn, Soybean |
| | | PROTÉGÉ FL | Corn |
| F | Bacillus pumilus | YIELD SHIELD | Corn, Soybean |
| F | Bacillus subtilis | HISTICK N/T | Soybean |
| | | VAULT HP | Corn, Soybean |
| F | Captan | CAPTAN 400 | Corn, Soybean |
| | | CAPTAN 400-C | Corny Soybean |
| F | Fludioxonil | MAXIM 4FS | Corn, Soybean |
| F | Hydrogen peroxide | OXIDATE | Soybean |
| | | STOROX | Soybean |
| F | ipconazole | ACCELERON DC-509 | Corn |
| | | RANCONA 3.8 FS | Corn, Soybean |
| | | VORTEX | Corn |
| F | mancozeb | BONIDE MANCOZEB w/Zinc | Corn |
| | | Concentrate | |
| | | DITHANE 75DF RAINSHIELD | Corn |
| | | DITHANE DF RAINSHIELD | Corn |
| | | DITHANE F45 RAINSHIELD | Corn |
| | | DITHANE M45 | Corn |
| | | LESCO 4 FLOWABLE | Corn |
| | | MANCOZEB | |
| | | PENNCOZEB 4FL FLOWABLE | Corn |
| | | PENNCOZEB 75DF DRY | Corn |
| | | FLOWABLE | |
| | | PENNCOZEB 80WP | Corn |
| F | mefenoxam | APRON XL | Corn, Soybean |
| F | metalaxyl | ACCELERON DC-309 | Corn |
| | | ACCELERON DX-309 | Corn, Soybean |
| | | ACQUIRE | Corn, Soybean |
| | | AGRI STAR METALAXYL 265 | Corn, Soybean |
| | | ST | |
| | | ALLEGIANCE DRY | Corn, Soybean |
| | | ALLEGIANCE FL | Corn, Soybean |
| | | BELMONT 2.7 FS | Corn, Soybean |
| | | DYNA-SHIELD METALAXYL | Corn, Soybean |
| | | SEBRING 2.65 ST | Corn, Soybean |
| | | SEBRING 318 FS | Corn, Soybean |
| | | SEBRING 480 FS | Corn, Soybean |
| | | VIREO MEC | Soybean |
| F | pyraclostrobin | ACCELERON DX-109 | Soybean |
| | | STAMINA | Corn |
| F | Streptomyces | MYCOSTOP | Corn, Soybean |
| | griseoviridis | | |
| F | Streptomyces lydicus | ACTINOGROW ST | Corn, Soybean |
| F | tebuconazole | AMTIDE TEBU 3.6F | Corn |
| | | SATIVA 309 FS | Corn |
| | | SATIVA 318 FS | Corn |
| | | TEBUSHA 3.6FL | Corn |
| | | TEBUZOL 3.6F | Corn |
| F | thiabendazole | MERTECT 340-F | Soybean |
| F | thiram | 42-S THIRAM | Corn, Soybean |
| | | FLOWSAN | Corn, Soybean |
| | | SIGNET 480 FS | Corn, Soybean |
| F | Trichoderma | T-22 HC | Corn, Soybean |
| | harzianum Rifai | | |
| F | trifloxystrobin | ACCELERON DX-709 | Corn |
| | | TRILEX FLOWABLE | Corn, soybean |
| I | chlorpyrifos | LORSBAN 50W in water soluble | Corn |
| | | packets | |
| I | clothianidin | ACCELERON IC-609 | Corn |
| | | NIPSIT INSIDE | Corn, Soybean |
| | | PONCHO 600 | Corn |
| I | imidacloprid | ACCELERON IX-409 | Corn |
| | | AGRI STAR MACHO 600 ST | Corn, Soybean |
| | | AGRISOLUTIONS NITRO | Corn, Soybean |
| | | SHIELD | |
| | | ATTENDANT 600 | Corn, Soybean |
| | | AXCESS | Corn, Soybean |
| | | COURAZE 2F | Soybean |
| | | DYNA-SHIELD | Corn, Soybean |
| | | IMIDACLOPRID 5 | |
| | | GAUCHO 480 FLOWABLE | Corn, Soybean |
| | | GAUCHO 600 FLOWABLE | Corn, Soybean |
| | | GAUCHO SB FLOWABLE | Corn, Soybean |
| | | NUPRID 4.6F PRO | Soybean |
| | | SENATOR 600 FS | Corn, Soybean |
| I | thiamethoxam | CRUISER 5FS | Corn, Soybean |
| N | abamectin | AVICTA 500 FS | Corn, Soybean |
| N | Bacillus firmus | VOTIVO FS | Soybean |
| P | cytokinin | SOIL X-CYTO | Soybean |
| | | X-CYTE | Soybean |
| P | harpin alpha beta | ACCELERON HX-209 | Corn, Soybean |
| | protein | N-HIBIT GOLD CST | Corn, Soybean |
| | | N-HIBIT HX-209 | Corn, Soybean |
| P | indole butyric acid | KICKSTAND PGR | Corn, Soybean |
| I, N | thiamethoxam, | AVICTA DUO CORN | Corn |
| | abamectin | AVICTA DUO 250 | |
| I, F | clothianidin, | PONCHO VOTIVO | Corn, Soybean |
| | Bacillus firmus | | |
| F, F | carboxin, captan | ENHANCE | Soybean |
| I, F | permethrin, carboxin | KERNEL GUARD SUPREME | Corn, Soybean |
| F, F | carboxin, thiram | VITAFLO 280 | Corn, Soybean |
| F, F | mefenoxam, fludioxonil | MAXIM XL | Corn, Soybean |
| | | WARDEN RTA | Soybean |
| | | APRON MAXX RFC | |
| | | APRON MAXX RTA + MOLY | |
| | | APRON MAXX RTA | |
| I, F | imidacloprid, metalaxyl | AGRISOLUTIONS CONCUR | Corn |
| F, F | metalaxyl, ipconazole | RANCONA SUMMIT | Soybean |
| | | RANCONA XXTRA | |
| F, F | thiram, metalaxyl | PROTECTOR-L-ALLEGIANCE | Soybean |
| F, F | trifloxystrobin, | TRILEX AL | Soybean |
| | metalaxyl | TRILEX 2000 | |
| P, P, P | cytokinin, gibberellic | STIMULATE YIELD | Corn, Soybean |
| | acid, indole butyric acid | ENHANCER ASCEND | |
| F, F, I | mefenoxam, | CRUISERMAXX PLUS | Soybean |
| | fludioxonil, | | |
| | thiamethoxam | | |
| F, F, F | captan, carboxin, | BEAN GUARD/ALLEGIANCE | Soybean |
| | metalaxyl | | |
| F, F, I | captan, carboxin, | ENHANCE AW | Soybean |
| | imidacloprid | | |
| F, F, I | carboxin, | LATITUDE | Corn, Soybean |
| | metalaxyl, imidacloprid | | |
| F, F, F | metalaxyl, | STAMINA F3 HL | Corn |
| | pyraclostrobin, | | |
| | triticonazole | | |
| F, F, F, I | azoxystrobin, | CRUISER EXTREME | Corn |
| | fludioxonil, | | |
| | mefenoxam, | | |
| | thiamethoxam | | |
| F, F, F, F, F | azoxystrobin, | MAXIM QUATTRO | Corn |
| | fludioxonil, | | |
| | mefenoxam, | | |
| | thiabendazole | | |
| I | Chlorantraniliprole | LUMIVIA | Corn |

F = Fungicide;
I = Insecticide;
N = Nematicide;
P = Plant Growth Regulator

### Application of Bacterial Populations on Crops

[0402] The composition of the bacteria or bacterial population described herein can be applied in furrow, in talc, or as seed treatment. The composition can be applied to a seed package in bulk, mini bulk, in a bag, or in talc.

[0403] The planter can plant the treated seed and grows the crop according to conventional ways, twin row, or ways that do not require tilling. The seeds can be distributed using a control hopper or an individual hopper. Seeds can also be distributed using pressurized air or manually. Seed placement can be performed using variable rate technologies. Additionally, application of the bacteria or bacterial population described herein may be applied using variable rate technologies. In some examples, the bacteria can be applied to seeds of corn, soybean, canola, sorghum, potato, rice, vegetables, cereals, pseudocereals, and oilseeds. Examples of cereals may include barley, fonio, oats, palmer's grass, rye, pearl millet, sorghum, spelt, teff, triticale, and wheat. Examples of pseudocereals may include breadnut, buckwheat, cattail, chia, flax, grain amaranth, hanza, quinoa, and sesame. In some examples, seeds can be genetically modified organisms (GMO), non-GMO, organic or conventional.

[0404] Additives such as micro-fertilizer, PGR, herbicide, insecticide, and fungicide can be used additionally to treat the crops. Examples of additives include crop protectants such as insecticides, nematicides, fungicide, enhancement agents such as colorants, polymers, pelleting, priming, and disinfectants, and other agents such as inoculant, PGR, softener, and micronutrients. PGRs can be natural or synthetic plant hormones that affect root growth, flowering, or stem elongation. PGRs can include auxins, gibberellins, cytokinins, ethylene, and abscisic acid (ABA).

[0405] The composition can be applied in furrow in combination with liquid fertilizer. In some examples, the liquid fertilizer may be held in tanks. NPK fertilizers contain macronutrients of sodium, phosphorous, and potassium.

[0406] The composition may improve plant traits, such as promoting plant growth, maintaining high chlorophyll content in leaves, increasing fruit or seed numbers, and increasing fruit or seed unit weight. Methods of the present disclosure may be employed to introduce or improve one or more of a variety of desirable traits. Examples of traits that may introduced or improved include: root biomass, root length, height, shoot length, leaf number, water use efficiency, overall biomass, yield, fruit size, grain size, photosynthesis rate, tolerance to drought, heat tolerance, salt tolerance, tolerance to low nitrogen stress, nitrogen use efficiency, resistance to nematode stress, resistance to a fungal pathogen, resistance to a bacterial pathogen, resistance to a viral pathogen, level of a metabolite, modulation in level of a metabolite, proteome expression. The desirable traits, including height, overall biomass, root and/or shoot biomass, seed germination, seedling survival, photosynthetic efficiency, transpiration rate, seed/fruit number or mass, plant grain or fruit yield, leaf chlorophyll content, photosynthetic rate, root length, or any combination thereof, can be used to measure growth, and compared with the growth rate of reference agricultural plants (e.g., plants without the introduced and/or improved traits) grown under identical conditions. In some examples, the desirable traits, including height, overall biomass, root and/or shoot biomass, seed germination, seedling survival, photosynthetic efficiency, transpiration rate, seed/fruit number or mass, plant grain or fruit yield, leaf chlorophyll content, photosynthetic rate, root length, or any combination thereof, can be used to measure growth, and compared with the growth rate of reference agricultural plants (e.g., plants without the introduced and/or improved traits) grown under similar conditions.

[0407] An agronomic trait to a host plant may include, but is not limited to, the following: altered oil content, altered protein content, altered seed carbohydrate composition, altered seed oil composition, and altered seed protein composition, chemical tolerance, cold tolerance, delayed senescence, disease resistance, drought tolerance, ear weight, growth improvement, health e4nhancement, heat tolerance, herbicide tolerance, herbivore resistance improved nitrogen fixation, improved nitrogen utilization, improved root architecture, improved water use efficiency, increased biomass, increased root length, increased seed weight, increased shoot length, increased yield, increased yield under water-limited conditions, kernel mass, kernel moisture content, metal tolerance, number of ears, number of kernels per ear, number of pods, nutrition enhancement, pathogen resistance, pest resistance, photosynthetic capability improvement, salinity tolerance, stay-green, vigor improvement, increased dry weight of mature seeds, increased fresh weight of mature seeds, increased number of mature seeds per plant, increased chlorophyll content, increased number of pods per plant, increased length of pods per plant, reduced number of wilted leaves per plant, reduced number of severely wilted leaves per plant, and increased number of non-wilted leaves per plant, a detectable modulation in the level of a metabolite, a detectable modulation in the level of a transcript, and a detectable modulation in the proteome, compared to an isoline plant grown from a seed without said seed treatment formulation.

[0408] In some cases, plants are inoculated with bacteria or bacterial populations that are isolated from the same species of plant as the plant element of the inoculated plant. For example, an bacteria or bacterial population that is normally found in one variety of Zea mays (corn) is associated with a plant element of a plant of another variety of Zea mays that in its natural state lacks said bacteria and bacterial populations. In one embodiment, the bacteria and bacterial populations is derived from a plant of a related species of plant as the plant element of the inoculated plant. For example, an bacteria and bacterial populations that is normally found in Zea diploperennis Iltis et al., (diploperennial teosinte) is applied to a Zea mays (corn), or vice versa. In some cases, plants are inoculated with bacteria and bacterial populations that are heterologous to the plant element of the inoculated plant. In one embodiment, the bacteria and bacterial populations is derived from a plant of another species. For example, an bacteria and bacterial populations that is normally found in dicots is applied to a monocot plant (e.g., inoculating corn with a soybean-derived bacteria and bacterial populations), or vice versa. In other cases, the bacteria and bacterial populations to be inoculated onto a plant is derived from a related species of the plant that is being inoculated. In one embodiment, the bacteria and bacterial populations is derived from a related taxon, for example, from a related species. The plant of another species can be an agricultural plant. In another embodiment, the bacteria and bacterial populations is part of a designed composition inoculated into any host plant element.

[0409] In some examples, the bacteria or bacterial population is exogenous wherein the bacteria and bacterial population is isolated from a different plant than the inoculated plant. For example, in one embodiment, the bacteria or bacterial population can be isolated from a different plant of the same species as the inoculated plant. In some cases, the bacteria or bacterial population can be isolated from a species related to the inoculated plant.

[0410] In some examples, the bacteria and bacterial populations described herein are capable of moving from one tissue type to another. For example, the present disclosure's detection and isolation of bacteria and bacterial populations within the mature tissues of plants after coating on the exterior of a seed demonstrates their ability to move from seed exterior into the vegetative tissues of a maturing plant. Therefore, in one embodiment, the population of bacteria and bacterial populations is capable of moving from the seed exterior into the vegetative tissues of a plant. In one embodiment, the bacteria and bacterial populations that is coated onto the seed of a plant is capable, upon germination of the seed into a vegetative state, of localizing to a different tissue of the plant. For example, bacteria and bacterial populations can be capable of localizing to any one of the tissues in the plant, including: the root, adventitious root, seminal 5 root, root hair, shoot, leaf, flower, bud, tassel, meristem, pollen, pistil, ovaries, stamen, fruit, stolon, rhizome, nodule, tuber, trichome, guard cells, hydathode, petal, sepal, glume, rachis, vascular cambium, phloem, and xylem. In one embodiment, the bacteria and bacterial populations is capable of localizing to the root and/or the root hair of the plant. In another embodiment, the bacteria and bacterial populations is capable of localizing to the photosynthetic tissues, for example, leaves and shoots of the plant. In other cases, the bacteria and bacterial populations is localized to the vascular tissues of the plant, for example, in the xylem and phloem. In still another embodiment, the bacteria and bacterial populations is capable of localizing to the reproductive tissues (flower, pollen, pistil, ovaries, stamen, fruit) of the plant. In another embodiment, the bacteria and bacterial populations is capable of localizing to the root, shoots, leaves and reproductive tissues of the plant. In still another embodiment, the bacteria and bacterial populations colonizes a fruit or seed tissue of the plant. In still another embodiment, the bacteria and bacterial populations is able to colonize the plant such that it is present in the surface of the plant (i.e., its presence is detectably present on the plant exterior, or the episphere of the plant). In still other embodiments, the bacteria and bacterial populations is capable of localizing to substantially all, or all, tissues of the plant. In certain embodiments, the bacteria and bacterial populations is not localized to the root of a plant. In other cases, the bacteria and bacterial populations is not localized to the photosynthetic tissues of the plant.

[0411] The effectiveness of the compositions can also be assessed by measuring the relative maturity of the crop or the crop heating unit (CHU). For example, the bacterial population can be applied to corn, and corn growth can be assessed according to the relative maturity of the corn kernel or the time at which the corn kernel is at maximum weight. The crop heating unit (CHU) can also be used to predict the maturation of the corn crop. The CHU determines the amount of heat accumulation by measuring the daily maximum temperatures on crop growth.

[0412] In examples, bacterial may localize to any one of the tissues in the plant, including: the root, adventitious root, seminal root, root hair, shoot, leaf, flower, bud tassel, meristem, pollen, pistil, ovaries, stamen, fruit, stolon, rhizome, nodule, tuber, trichome, guard cells, hydathode, petal, sepal, glume, rachis, vascular cambium, phloem, and xylem. In another embodiment, the bacteria or bacterial population is capable of localizing to the photosynthetic tissues, for example, leaves and shoots of the plant. In other cases, the bacteria and bacterial populations is localized to the vascular tissues of the plant, for example, in the xylem and phloem. In another embodiment, the bacteria or bacterial population is capable of localizing to reproductive tissues (flower, pollen, pistil, ovaries, stamen, or fruit) of the plant. In another embodiment, the bacteria and bacterial populations is capable of localizing to the root, shoots, leaves and reproductive tissues of the plant. In another embodiment, the bacteria or bacterial population colonizes a fruit or seed tissue of the plant. In still another embodiment, the bacteria or bacterial population is able to colonize the plant such that it is present in the surface of the plant. In another embodiment, the bacteria or bacterial population is capable of localizing to substantially all, or all, tissues of the plant. In certain embodiments, the bacteria or bacterial population is not localized to the root of a plant. In other cases, the bacteria and bacterial populations is not localized to the photosynthetic tissues of the plant.

[0413] The effectiveness of the bacterial compositions applied to crops can be assessed by measuring various features of crop growth including, but not limited to, planting rate, seeding vigor, root strength, drought tolerance, plant height, dry down, and test weight.

### Plant Species

[0414] The methods and bacteria described herein are suitable for any of a variety of plants, such as plants in the genera Hordeum, Oryza, Zea, and Triticeae. Other non-limiting examples of suitable plants include mosses, lichens, and algae. In some cases, the plants have economic, social and/or environmental value, such as food crops, fiber crops, oil crops, plants in the forestry or pulp and paper industries, feedstock for biofuel production and/or ornamental plants. In some examples, plants may be used to produce economically valuable products such as a grain, a flour, a starch, a syrup, a meal, an oil, a film, a packaging, a nutraceutical product, a pulp, an animal feed, a fish fodder, a bulk material for industrial chemicals, a cereal product, a processed human-food product, a sugar, an alcohol, and/or a protein. Non-limiting examples of crop plants include maize, rice, wheat, barley, sorghum, millet, oats, rye triticale, buckwheat, sweet corn, sugar cane, onions, tomatoes, strawberries, and asparagus. In some embodiments, the methods and bacteria described herein are suitable for any of a variety of transgenic plants, non-transgenic plants, and hybrid plants thereof.

[0415] In some examples, plants that may be obtained or improved using the methods and composition disclosed herein may include plants that are important or interesting for agriculture, horticulture, biomass for the production of biofuel molecules and other chemicals, and/or forestry. Some examples of these plants may include pineapple, banana, coconut, lily, grasspeas and grass; and dicotyledonous plants, such as, for example, peas, alfalfa, tomatillo, melon, chickpea, chicory, clover, kale, lentil, soybean, tobacco, potato, sweet potato, radish, cabbage, rape, apple trees, grape, cotton, sunflower, thale cress, canola, citrus (including orange, mandarin, kumquat, lemon, lime, grapefruit, tangerine, tangelo, citron, and pomelo), pepper, bean, lettuce, Panicum virgatum (switch), Sorghum bicolor (sorghum, sudan), Miscanthus giganteus (miscanthus), Saccharum sp. (energycane), Populus balsamifera (poplar), Zea mays (corn), Glycine max (soybean), Brassica napus (canola), Triticum aestivum (wheat), Gossypium hirsutum (cotton), Oryza sativa (rice), Helianthus annuus (sunflower), Medicago sativa (alfalfa), Beta vulgaris (sugarbeet), Pennisetum glaucum (pearl millet), Panicum spp. Sorghum spp., Miscanthus spp., Saccharum spp., Erianthus spp., Populus spp., Secale cereale (rye), Salix spp. (willow), Eucalyptus spp. (eucalyptus), Triticosecale spp. (triticum-25 wheat X rye), Bamboo, Carthamus tinctorius (safflower), Jatropha curcas (Jatropha), Ricinus communis (castor), Elaeis guineensis (oil palm), Phoenix dactylifera (date palm), Archontophoenix cunninghamiana (king palm), Syagrus romanzoffiana (queen palm), Linum usitatissimum (flax), Brassica juncea, Manihot esculenta (cassaya), Lycopersicon esculentum (tomato), Lactuca saliva (lettuce), Musa paradisiaca (banana), Solanum tuberosum (potato), Brassica oleracea (broccoli, cauliflower, brussel sprouts), Camellia sinensis (tea), Fragaria ananassa (strawberry), Theobroma cacao (cocoa), Coffea arabica (coffee), Vitis vinifera (grape), Ananas comosus (pineapple), Capsicum annum (hot & sweet pepper), Allium cepa (onion), Cucumis melo (melon), Cucumis sativus (cucumber), Cucurbita maxima (squash), Cucurbita moschata (squash), Spinacea oleracea (spinach), Citrullus lanatus (watermelon), Abelmoschus esculentus (okra), Solanum melongena (eggplant), Papaver somniferum (opium poppy), Papaver orientale, Taxus baccata, Taxus brevifolia, Artemisia annua, Cannabis saliva, Camptotheca acuminate, Catharanthus roseus, Vinca rosea, Cinchona officinalis, Coichicum autumnale, Veratrum californica, Digitalis lanata, Digitalis purpurea, Dioscorea 5 spp., Andrographis paniculata, Atropa belladonna, Datura stomonium, Berberis spp., Cephalotaxus spp., Ephedra sinica, Ephedra spp., Erythroxylum coca, Galanthus wornorii, Scopolia spp., Lycopodium serratum (Huperzia serrata), Lycopodium spp., Rauwolfia serpentina, Rauwolfia spp., Sanguinaria canadensis, Hyoscyamus spp., Calendula officinalis, Chrysanthemum parthenium, Coleus forskohlii, Tanacetum parthenium, Parthenium argentatum (guayule), Hevea spp. (rubber), Mentha spicata (mint), Mentha piperita (mint), Bixa orellana, Alstroemeria spp., Rosa spp. (rose), Dianthus caryophyllus (carnation), Petunia spp. (petunia), Poinsettia pulcherrima (poinsettia), Nicotiana tabacum (tobacco), Lupinus albus (lupin), Uniola paniculata (oats), Hordeum vulgare (barley), and Lolium spp. (rye).

[0416] In some examples, a monocotyledonous plant may be used. Monocotyledonous plants belong to the orders of the Alismatales, Arales, Arecales, Bromeliales, Commelinales, Cyclanthales, Cyperales, Eriocaulales, Hydrocharitales, Juncales, Lilliales, Najadales, Orchidales, Pandanales, Poales, Restionales, Triuridales, Typhales, and Zingiberales. Plants belonging to the class of the Gymnospermae are Cycadales, Ginkgoales, Gnetales, and Pinales. In some examples, the monocotyledonous plant can be selected from the group consisting of a maize, rice, wheat, barley, and sugarcane.

[0417] In some examples, a dicotyledonous plant may be used, including those belonging to the orders of the Aristochiales, Asterales, Batales, Campanulales, Capparales, Caryophyllales, Casuarinales, Celastrales, Comales, Diapensales, Dilleniales, Dipsacales, Ebenales, Ericales, Eucomiales, Euphorbiales, Fabales, Fagales, Gentianales, Geraniales, Haloragales, Hamamelidales, Middles, Juglandales, Lamiales, Laurales, Lecythidales, Leitneriales, Magniolales, Malvales, Myricales, Myrtales, Nymphaeales, Papeverales, Piperales, Plantaginales, Plumb aginales, Podostemales, Polemoniales, Polygalales, Polygonales, Primulales, Proteales, Rafflesiales, Ranunculales, Rhamnales, Rosales, Rubiales, Salicales, Santales, Sapindales, Sarraceniaceae, Scrophulariales, Theales, Trochodendrales, Umbellales, Urticales, and Violates. In some examples, the dicotyledonous plant can be selected from the group consisting of cotton, soybean, pepper, and tomato.

[0418] In some cases, the plant to be improved is not readily amenable to experimental conditions. For example, a crop plant may take too long to grow enough to practically assess an improved trait serially over multiple iterations. Accordingly, a first plant from which bacteria are initially isolated, and/or the plurality of plants to which genetically manipulated bacteria are applied may be a model plant, such as a plant more amenable to evaluation under desired conditions. Non-limiting examples of model plants include Setaria, Brachypodium, and Arabidopsis. Ability of bacteria isolated according to a method of the disclosure using a model plant may then be applied to a plant of another type (e.g. a crop plant) to confirm conferral of the improved trait.

[0419] Traits that may be improved by the methods disclosed herein include any observable characteristic of the plant, including, for example, growth rate, height, weight, color, taste, smell, changes in the production of one or more compounds by the plant (including for example, metabolites, proteins, drugs, carbohydrates, oils, and any other compounds). Selecting plants based on genotypic information is also envisaged (for example, including the pattern of plant gene expression in response to the bacteria, or identifying the presence of genetic markers, such as those associated with increased nitrogen fixation). Plants may also be selected based on the absence, suppression or inhibition of a certain feature or trait (such as an undesirable feature or trait) as opposed to the presence of a certain feature or trait (such as a desirable feature or trait).

### Non-Genetically Modified Maize

[0420] The methods and bacteria described herein are suitable for any of a variety of non-genetically modified maize plants or part thereof. And in some aspects the corn is organic. Furthermore, the methods and bacteria described herein are suitable for any of the following non-genetically modified hybrids, varieties, lineages, etc. In some embodiments, corn varieties generally fall under six categories: sweet corn, flint corn, popcorn, dent corn, pod corn, and flour corn.

### Sweet Corn

[0421] Yellow su varieties include Earlivee, Early Sunglow, Sundance, Early Golden Bantam, Iochief, Merit, Jubilee, and Golden Cross Bantam. White su varieties include True Platinum, Country Gentleman, Silver Queen, and Stowell's Evergreen. Bicolor su varieties include Sugar & Gold, Quickie, Double Standard, Butter & Sugar, Sugar Dots, Honey & Cream. Multicolor su varieties include Hookers, Triple Play, Painted Hill, Black Mexican/Aztec.

[0422] Yellow se varieties include Buttergold, Precocious, Spring Treat, Sugar Buns, Colorow, Kandy King, Bodacious R/M, Tuxedo, Incredible, Merlin, Miracle, and Kandy Korn EH. White se varieties include Spring Snow, Sugar Pearl, Whiteout, Cloud Nine, Alpine, Silver King, and Argent. Bicolor se varieties include Sugar Baby, Fleet, Bon Jour, Trinity, Bi-Licious, Temptation, Luscious, Ambrosia, Accord, Brocade, Lancelot, Precious Gem, Peaches and Cream Mid EH, and Delectable R/M. Multicolor se varieties include Ruby Queen.

[0423] Yellow sh2 varieties include Extra Early Super Sweet, Takeoff, Early Xtra Sweet, Raveline, Summer Sweet Yellow, Krispy King, Garrison, Illini Gold, Challenger, Passion, Excel, Jubilee SuperSweet, Illini Xtra Sweet, and Crisp 'N Sweet. White sh2 varieties include Summer Sweet White, Tahoe, Aspen, Treasure, How Sweet It Is, and Camelot. Bicolor sh2 varieties include Summer Sweet Bicolor, Radiance, Honey 'N Pearl, Aloha, Dazzle, Hudson, and Phenomenal.

[0424] Yellow sy varieties include Applause, Inferno, Honeytreat, and Honey Select. White sy varieties include Silver Duchess, Cinderella, Mattapoisett, Avalon, and Captivate. Bicolor sy varieties include Pay Dirt, Revelation, Renaissance, Charisma, Synergy, Montauk, Kristine, Serendipity/Providence, and Cameo.

[0425] Yellow augmented supersweet varieties include Xtra-Tender 1ddA, Xtra-Tender 11dd, Mirai 131Y, Mirai 130Y, Vision, and Mirai 002. White augmented supersweet varieties include Xtra-Tender 3dda, Xtra-Tender 31dd, Mirai 421W, XTH 3673, and Devotion. Bicolor augmented supersweet varieties include Xtra-Tender 2dda, Xtra-Tender 21dd, Kickoff XR, Mirai 308BC, Anthem XR, Mirai 336BC, Fantastic XR, Triumph, Mirth 301BC, Stellar, American Dream, Mirai 350BC, and Obsession.

### Flint Corn

[0426] Flint corn varieties include Bronze-Orange, Candy Red Flint, Floriani Red Flint, Glass Gem, Indian Ornamental (Rainbow), Mandan Red Flour, Painted Mountain, Petmecky, Cherokee White Flour,

### PopCorn

[0427] Pop corn varieties include Monarch Butterfly, Yellow Butterfly, Midnight Blue, Ruby Red, Mixed Baby Rice, Queen Mauve, Mushroom Flake, Japanese Hull-less, Strawberry, Blue Shaman, Miniature Colored, Miniature Pink, Pennsylvania Dutch Butter Flavor, and Red Strawberry.

### Dent Corn

[0428] Dent corn varieties include Bloody Butcher, Blue Clarage, Ohio Blue Clarage, Cherokee White Eagle, Hickory Cane, Hickory King, Jellicorse Twin, Kentucky Rainbow, Daymon Morgan's Knt. Butcher, Leaming, Leaming's Yellow, McCormack's Blue Giant, Neal Paymaster, Pungo Creek Butcher, Reid's Yellow Dent, Rotten Clarage, and Tennessee Red Cob.

[0429] In some embodiments, corn varieties include P1618W, P1306W, P1345, P1151, P1197, P0574, P0589, and P0157. W=white corn.

[0430] In some embodiments, the methods and bacteria described herein are suitable for any hybrid of the maize varieties setforth herein.

### Genetically Modified Maize

[0431] The methods and bacteria described herein are suitable for any of a hybrid, variety, lineage, etc. of genetically modified maize plants or part thereof.

[0432] Furthermore, the methods and bacteria described herein are suitable for any of the following genetically modified maize events, which have been approved in one or more countries: 32138 (32138 SPT Maintainer), 3272 (ENOGEN), 3272 x Bt11, 3272 x bt11 x GA21, 3272 x Bt11 x MIR604, 3272 x Bt11 x MIR604 x GA21, 3272 x Bt11 x MIR604 x TC1507 x 5307 x GA21, 3272 x GA21, 3272 x MIR604, 3272 x MIR604 x GA21, 4114, 5307 (AGRISURE Duracade), 5307 x GA21, 5307 x MIR604 x Bt11 x TC1507 x GA21 (AGRISURE Duracade 5122), 5307 x MIR604 x Bt11 x TC1507 x GA21 x MIR162 (AGRISURE Duracade 5222), 59122 (HERCULEX RW), 59122 x DAS40278, 59122 x GA21, 59122 x MIR604, 59122 x MIR604 x GA21, 59122 x MIR604 x TC1507, 59122 x MIR604 x TC1507 x GA21, 59122 x MON810, 59122 x MON810 x MIR604, 59122 x MON810 x NK603, 59122 x MON810 x NK603 x MIR604, 59122 x MON88017, 59122 x MON88017 x DAS40278, 59122 x NK603 (Herculex RW ROUNDUP READY 2), 59122 x NK603 x MIR604, 59122 x TC1507 x GA21, 676, 678, 680, 3751 IR, 98140, 98140 x 59122, 98140 x TC1507, 98140 x TC1507 x 59122, Bt10 (Bt10), Bt11 [X4334CBR, X4734CBR] (AGRISURE CB/LL), Bt11 x 5307, Bt11 x 5307 x GA21, Bt11 x 59122 x MIR604, Br11 x 59122 x MIR604 x GA21, Bt11 x 59122 x MIR604 x TC1507, M53, M56, DAS-59122-7, Bt11 x 59122 x MIR604 x TC1507 x GA21, Bt11 x 59122 x TC1507, TC1507 x DAS-59122-7, Bt11 x 59122 x TC1507 x GA21, Bt11 x GA21 (AGRISURE GT/CB/LL), Bt11 x MIR162 (AGRISURE Viptera 2100), BT11 x MIR162 x 5307, Bt11 x MIR162 x 5307 x GA21, Bt11 x MIR162 x GA21 (AGRISURE Viptera 3110), Bt11 x MIR162 x MIR604 (AGRISURE Viptera 3100), Bt11 x MIR162 x MIR604 x 5307, Bt11 x MIR162 x MIR604 x 5307 x GA21, Bt11 x MIR162 x MIR604 x GA21 (AGRISURE Viptera 3111/AGRISURE Viptera 4), Bt11, MIR162 x MIR604 x MON89034 x 5307 x GA21, Bt11 x MIR162 x MIR604 x TC1507, Bt11 x MIR162 x MIR604 x TC1507 x 5307, Bt11 x MIR162 x MIR604 x TC1507 x GA21, Bt11 x MIR162 x MON89034, Bt11 x MIR162 x MON89034 x GA21, Bt11 x MIR162 x TC1507, Bt11 x MIR162 x TC1507 x 5307, Bt11 x MIR162 x TC1507 x 5307 x GA21, Bt11 x MR162 x TC1507 x GA21 (AGRISURE Viptera 3220), BT11 x MIR604 (Agrisure BC/LL/RW), Bt11 x MIR604 x 5307, Bt11 x MIR604 x 5307 x GA21, Bt11 x MIR604 x GA21, Bt11 x MIR604 x TC1507, Bt11 x MIR604 x TC1507 x 5307, Bt11 x MIR604 x TC1507 x GA21, Bt11 x MON89034 x GA21, Bt11 x TC1507, Bt11 x TC1507 x 5307, Bt11 x TC1507 x GA21, Bt176 (NaturGard KnockOut/Maximizer), BVLA430101, CBH-351 (STARLINK Maize), DAS40278 (ENLIST Maize), DAS40278 x NK603, DBT418 (Bt Xtra Maize), DLL25 [B16], GA21 (ROUNDUP READY Maize/AGRISURE GT), GA21 x MON810 (ROUNDUP READY Yieldgard Maize), GA21 x T25, HCEM485, LY038 (MAVERA Maize), LY038 x MON810 (MAVERA Yieldgard Maize), MIR162 (AGRISURE Viptera), MIR162 x 5307, MIR162 x 5307 x GA21, MIR162 x GA21, MIR162 x MIR604, MIR162 x MIR604 x 5307, MIR162 x MIR604 x 5307 x GA21, MIR162 x MIR604 x GA21, MIR162 x MIR604 x TC1507 x 5307, MIR162 x MIR604 x TC1507 x 5307 x GA21, MIR162 x MIR604 x TC1507 x GA21, MIR162 x MON89Ø34, MIR162 x NK603, MIR162 x TC1507, MIR162 x TC1507 x 5307, MIR162 x TC1507 x 5307 x GA21, MIR162 x TC1507 x GA21, MIR604 (AGRISURE RW), MIR604 x 5307, MIR604 x 5307 x GA21, MIR604 x GA21 (AGRISURE GT/RW), MIR604 x NK603, MIR604 x TC1507, MIR604 x TC1507 x 5307, MIR604 x TC1507 x 5307 x GA21, MIR604 x TC1507 x GA21, MON801 [MON80100], MON802, MON809, MON810 (YIELDGARD, MAIZEGARD), MON810 x MIR162, MON810 x MIR162 x NK603, MON810 x MIR604, MON810 x MON88017 (YIELDGARD VT Triple), MON810 x NK603 x MIR604, MON832 (ROUNDUP READY Maize), MON863 (YIELDGARD Rootworm RW, MAXGARD), MON863 x MON810 (YIELDGARD Plus), MON863 x MON810 x NK603 (YIELDGARD Plus with RR), MON863 x NK603 (YIELDGARD RW+RR), MON87403, MON87411, MON87419, MON87427 (ROUNDUP READY Maize), MON87427 x 59122, MON87427 x MON88017, MON87427 x MON88017 x 59122, MON87427 x MON89034, MON87427 x MON89034 x 59122, MON87427 x MON89034 x MIR162 x MON87411, MON87427 x MON89034 x MON88017, MON87427 x MON89034 x MON88017 x 59122, MON87427 x MON89034 x NK603, MON87427 x MON89034 x TC1507, MON87427 x MON89034 x TC1507 x 59122, MON87427 x MON89034 x TC1507 x MON87411 x 59122, MON87427 x MON89034 x TC1507 x MON87411 x 59122 x DAS40278, MON87427 x MON89034 x TC1507 x MON88017, MON87427 x MON89034 x MIR162 x NK603, MON87427 x MON89034 x TC15Ø7 x MON88017 x 59122, MON87427 x TC1507, MON87427 x TC1507 x 59122, MON87427 x TC1507 x MON88017, MON87427 x TC1507 x MON88017 x 59122, MON87460 (GENUITY DROUGHTGARD), MON87460 x MON88017, MON87460 x MON89034 x MON88017, MON87460 x MON89034 x NK603, MON87460 x NK603, MON88017, MON88017 x DAS40278, MON89034, MON89034 x 59122, MON89034 x 59122 x DAS40278, MON89034 x 59122 x MON88017, MON89034 x 59122 x MON88017 x DAS40278, MON89034 x DAS40278, MON89034 x MON87460, MON89034 x MON88017 (GENUITY VT Triple Pro), MON89034 x MON88017 x DAS40278, MON89034 x NK603 (GENUITY VT Double Pro), MON89034 x NK603 x DAS40278, MON89034 x TC1507, MON89034 x TC1507 x 59122, MON89034 x TC1507 x 59122 x DAS40278, MON89034 x TC1507 x DAS40278, MON89034 x TC1507 x MON88017, MON89034 x TC1507 x MON88017 x 59122 (GENUITY SMARTSTAX), MON89034 x TC1507 x MON88017 x 59122 x DAS40278, MON89034 x TC1507 x MON88017 x DAS40278, MON89034 x TC1507 x NK603 (POWER CORE), MON89034 x TC1507 x NK603 x DAS40278, MON89034 x TC1507 x NK603 x MIR162, MON89034 x TC1507 x NK603 x MIR162 x DAS40278, MON89034 x GA21, MS3 (INVIGOR Maize), MS6 (INVIGOR Maize), MZHG0JG, MZIR098, NK603 (ROUNDUP READY 2 Maize), NK603 x MON810 x 4114 x MIR604, NK603 x MON810 (YIELDGARD CB+RR), NK603 x T25 (ROUNDUP READY LIBERTY LINK Maize), T14 (LIBERTY LINK Maize), T25 (LIBERTY LINK Maize), T25 x MON810 (LIBERTY LINK YIELDGARD Maize), TC1507 (HERCULEX I, HERCULEX CB), TC1507 x 59122 x MON810 x MIR604 x NK603 (OPTIMUM INTRASECT XTREME), TC1507 x MON810 x MIR604 x NK603, TC1507 x 5307, TC1507 x 5307 x GA21, TC1507 x 59122 (HERCULEX XTRA), TC1507 x 59122 x DAS40278, TC1507 x 59122 x MON810, TC1507 x 59122 x MON810 x MIR604, TC1507 x 59122 x MON810 x NK603 (OPTIMUM INTRASECT XTRA), TC1507 x 59122 x MON88017, TC1507 x 59122 x MON88017 x DAS40278, TC1507 x 59122 x NK603 (HERCULEX XTRA RR), TC1507 x 59122 x NK603 x MIR604, TC1507 x DAS40278, TC1507 x GA21, TC1507 x MIR162 x NK603, TC1507 x MIR604 x NK603 (OPTIMUM TRISECT), TC1507 x MON810, TC1507 x MON810 x MIR162, TC1507 x MON810 x MIR162 x NK603, TC1507 x MON810 x MIR604, TC1507 x MON810 x NK603 (OPTIMUM INTRASECT), TC1507 x MON810 x NK603 x MIR604, TC1507 x MON88017, TC1507 x MON88017 x DAS40278, TC1507 x NK603 (HERCULEX I RR), TC1507 x NK603 x DAS40278, TC6275, and VCO-01981-5.

### Additional Genetically Modified Plants

[0433] The methods and bacteria described herein are suitable for any of a variety of genetically modified plants or part thereof.

[0434] Furthermore, the methods and bacteria described herein are suitable for any of the following genetically modified plant events which have been approved in one or more countries.

TABLE 14
Rice Traits, which can be combined with microbes of the disclosure
Oryza sativa Rice

| Event | Company | Description |
|---|---|---|
| CL121, CL141, CFX51 | BASF Inc. | Tolerance to the imidazolinone |
| | | herbicide, imazethapyr, induced by |
| | | chemical mutagenesis of the |
| | | acetolactate synthase (ALS) |
| | | enzyme using ethyl |
| | | methanesulfonate (EMS). |
| IMINTA-1, IMINTA-4 | BASF Inc. | Tolerance to imidazolinone |
| | | herbicides induced by chemical |
| | | mutagenesis of the acetolactate |
| | | synthase (ALS) enzyme using |
| | | sodium azide. |
| LLRICE06, LLRICE62 | Aventis CropScience | Glufosinate ammonium herbicide |
| | | tolerant rice produced by inserting |
| | | a modified phosphinothricin |
| | | acetyltransferase (PAT) encoding |
| | | gene from the soil bacterium |
| | | Streptomyces hygroscopicus). |
| LLRICE601 | Bayer CropScience (Aventis | Glufosinate ammonium herbicide |
| | CropScience(AgrEvo)) | tolerant rice produced by inserting |
| | | a modified phosphinothricin |
| | | acetyltransferase (PAT) encoding |
| | | gene from the soil bacterium |
| | | Streptomyces hygroscopicus). |
| PWC16 | BASF Inc. | Tolerance to the imidazolinone |
| | | herbicide, imazethapyr, induced by |
| | | chemical mutagenesis of the |
| | | acetolactate synthase (ALS) |
| | | enzyme using ethyl |
| | | methanesulfonate (EMS). |

TABLE 15
Alfalfa Traits, which can be combined with microbes of the disclosure
Medicago sativa Alfalfa

| Event | Company | Description |
|---|---|---|
| J101, J163 | Monsanto Company and | Glyphosate herbicide tolerant |
| | Forage Genetics | alfalfa (lucerne) produced by |
| | International | inserting a gene encoding the |
| | | enzyme 5-enolypyruvylshikimate- |
| | | 3-phosphate synthase (EPSPS) |
| | | from the CP4 strain of |
| | | Agrobacterium tumefaciens. |

TABLE 16
Wheat Traits, which can be combined with microbes of the disclosure
Triticum aestivum Wheat

| Event | Company | Description |
|---|---|---|
| AP205CL | BASF Inc. | Selection for a mutagenized version |
| | | of the enzyme acetohydroxyacid |
| | | synthase (AHAS), also known as |
| | | acetolactate synthase (ALS) or |
| | | acetolactate pyruvate-lyase. |
| AP602CL | BASF Inc. | Selection for a mutagenized version |
| | | of the enzyme acetohydroxyacid |
| | | synthase (AHAS), also known as |
| | | acetolactate synthase (ALS) or |
| | | acetolactate pyruvate-lyase. |
| BW255-2, BW238-3 | BASF Inc. | Selection for a mutagenized version |
| | | of the enzyme acetohydroxyacid |
| | | synthase (AHAS), also known as |
| | | acetolactate synthase (ALS) or |
| | | acetolactate pyruvate-lyase. |
| BW7 | BASF Inc. | Tolerance to imidazolinone |
| | | herbicides induced by chemical |
| | | mutagenesis of the |
| | | acetohydroxyacid synthase (AHAS) |
| | | gene using sodium azide. |
| MON71800 | Monsanto Company | Glyphosate tolerant wheat variety |
| | | produced by inserting a modified 5- |
| | | enolpyruvylshikimate-3-phosphate |
| | | synthase (EPSPS) encoding gene |
| | | from the soil bacterium |
| | | Agrobacterium tumefaciens, strain |
| | | CP4. |
| SWP965001 | Cyanamid Crop | Selection for a mutagenized version |
| | Protection | of the enzyme acetohydroxyacid |
| | | synthase (AHAS), also known as |
| | | acetolactate synthase (ALS) or |
| | | acetolactate pyruvate-lyase. |
| Teal 11A | BASF Inc. | Selection for a mutagenized version |
| | | of the enzyme acetohydroxyacid |
| | | synthase (AHAS), also known as |
| | | acetolactate synthase (ALS) or |
| | | acetolactate pyruvate-lyase. |

TABLE 17
Sunflower Traits, which can be combined with microbes of the disclosure
Helianthus annuus Sunflower

| Event | Company | Description |
|---|---|---|
| X81359 | BASF Inc. | Tolerance to imidazolinone |
| | | herbicides by selection of a |
| | | naturally occurring mutant. |

TABLE 18
Soybean Traits, which can be combined with microbes of the disclosure
Glycine max L. Soybean

| Event | Company | Description |
|---|---|---|
| A2704-12, A2704-21, | Bayer CropScience | Glufosinate ammonium herbicide |
| A5547-35 | (Aventis CropScience | tolerant soybean produced by |
| | (AgrEvo)) | inserting a modified |
| | | phosphinothricin acetyltransferase |
| | | (PAT) encoding gene from the soil |
| | | bacterium Streptomyces |
| | | viridochromogenes. |
| A5547-127 | Bayer CropScience | Glufosinate ammonium herbicide |
| | (Aventis CropScience | tolerant soybean produced by |
| | (AgrEvo)) | inserting a modified |
| | | phosphinothricin acetyltransferase |
| | | (PAT) encoding gene from the soil |
| | | bacterium Streptomyces |
| | | viridochromogenes. |
| BPS-CV127-9 | BASF Inc. | The introduced csr1-2 gene from |
| | | Arabidopsis thaliana encodes an |
| | | acetohydroxyacid synthase protein |
| | | that confers tolerance to |
| | | imidazolinone herbicides due to a |
| | | point mutation that results in a |
| | | single amino acid substitution in |
| | | which the serine residue at position |
| | | 653 is replaced by asparagine |
| | | (S653N). |
| DP-305423 | Pioneer Hi-Bred | High oleic acid soybean produced |
| | International Inc. | by inserting additional copies of a |
| | | portion of the omega 6 desaturase |
| | | encoding gene, gm-fad2-1 resulting |
| | | in silencing of the endogenous |
| | | omega-6 desaturase gene (FAD2-1). |
| DP356043 | Pioneer Hi-Bred | Soybean event with two herbicide |
| | International Inc. | tolerance genes: glyphosate N- |
| | | acetlytransferase, which detoxifies |
| | | glyphosate, and a modified |
| | | acetolactate synthase (ALS) gene |
| | | which is tolerant to ALS-inhibiting |
| | | herbicides. |
| G94-1, G94-19, G168 | DuPont Canada | High oleic acid soybean produced |
| | Agricultural Products | by inserting a second copy of the |
| | | fatty acid desaturase (Gm Fad2-1) |
| | | encoding gene from soybean, which |
| | | resulted in “silencing” of the |
| | | endogenous host gene. |
| GTS 40-3-2 | Monsanto Company | Glyphosate tolerant soybean variety |
| | | produced by inserting a modified 5- |
| | | enolpyruvylshikimate-3-phosphate |
| | | synthase (EPSPS) encoding gene |
| | | from the soil bacterium |
| | | Agrobacterium tumefaciens. |
| GU262 | Bayer CropScience | Glufosinate ammonium herbicide |
| | (Aventis | tolerant soybean produced by |
| | CropScience(AgrEvo)) | inserting a modified |
| | | phosphinothricin acetyltransferase |
| | | (PAT) encoding gene from the soil |
| | | bacterium Streptomyces |
| | | viridochromogenes. |
| MON87701 | Monsanto Company | Resistance to Lepidopteran pests of |
| | | soybean including velvetbean |
| | | caterpillar (Anticarsia gemmatalis) |
| | | and soybean looper (Pseudoplusia |
| | | includens). |
| MON87701 × | Monsanto Company | Glyphosate herbicide tolerance |
| MON89788 | | through expression of the EPSPS |
| | | encoding gene from A. tumefaciens |
| | | strain CP4, and resistance to |
| | | Lepidopteran pests of soybean |
| | | including velvetbean caterpillar |
| | | (Anticarsia gemmatalis) and |
| | | soybean looper (Pseudoplusia |
| | | includens) via expression of the |
| | | Cry1Ac encoding gene from |
| | | B. thuringiensis. |
| MON89788 | Monsanto Company | Glyphosate-tolerant soybean |
| | | produced by inserting a modified 5- |
| | | enolpyruvylshikimate-3-phosphate |
| | | synthase (EPSPS) encoding aroA |
| | | (epsps) gene from Agrobacterium |
| | | tumefaciens CP4. |
| OT96-15 | Agriculture & Agri-Food | Low linolenic acid soybean |
| | Canada | produced through traditional cross- |
| | | breeding to incorporate the novel |
| | | trait from a naturally occurring fan1 |
| | | gene mutant that was selected for |
| | | low linolenic acid. |
| W62, W98 | Bayer CropScience | Glufosinate ammonium herbicide |
| | (Aventis | tolerant soybean produced by |
| | CropScience(AgrEvo)) | inserting a modified |
| | | phosphinothricin acetyltransferase |
| | | (PAT) encoding gene from the soil |
| | | bacterium Streptomyces |
| | | hygroscopicus. |

TABLE 19
Corn Traits, which can be combined with microbes of the disclosure
Zea mays L. Maize

| Event | Company | Description |
|---|---|---|
| 176 | Syngenta Seeds, Inc. | Insect-resistant maize produced by |
| | | inserting the Cry1Ab gene from |
| | | Bacillus thuringiensis subsp. |
| | | kurstaki. The genetic modification |
| | | affords resistance to attack by the |
| | | European corn borer (ECB). |
| 3751 IR | Pioneer Hi-Bred | Selection of somaclonal variants |
| 676, 678, 680 | International Inc. | by culture of embryos on |
| | Pioneer Hi-Bred | imidazolinone containing media. |
| | International Inc. | Male-sterile and glufosinate |
| | | ammonium herbicide tolerant |
| | | maize produced by inserting genes |
| | | encoding DNA adenine methylase |
| | | and phosphinothricin |
| | | acetyltransferase (PAT) from |
| | | Escherichia coli and Streptomyces |
| | | viridochromogenes, respectively. |
| B16 (DLL25) | Dekalb Genetics | Glufosinate ammonium herbicide |
| | Corporation | tolerant maize produced by |
| | | inserting the gene encoding |
| | | phosphinothricin acetyltransferase |
| | | (PAT) from Streptomyces |
| | | hygroscopicus. |
| BT11 (X4334CBR, | Syngenta Seeds, Inc. | Insect-resistant and herbicide |
| X4734CBR) | | tolerant maize produced by |
| | | inserting the Cry1Ab gene from |
| | | Bacillus thuringiensis subsp. |
| | | kurstaki, and the phosphinothricin |
| | | N-acetyltransferase (PAT) |
| | | encoding gene from |
| | | S. viridochromogenes. |
| BT11 × GA21 | Syngenta Seeds, Inc. | Stacked insect resistant and |
| | | herbicide tolerant maize produced |
| | | by conventional cross breeding of |
| | | parental lines BT11 (OECD unique |
| | | identifier: SYN-BTO11-1) and |
| | | GA21 (OECD unique identifier: |
| | | MON-OOO21-9). |
| BT11 × MIR162 × | Syngenta Seeds, Inc. | Resistance to Coleopteran pests, |
| MIR604 × GA21 | | particularly corn rootworm pests |
| | | (Diabrotica spp.) and several |
| | | Lepidopteran pests of corn, |
| | | including European corn borer |
| | | (ECB, Ostrinia nubilalis), corn |
| | | earworm (CEW, Helicoverpa zea), |
| | | fall army worm (FAW, Spodoptera |
| | | frugiperda), and black cutworm |
| | | (BCW, Agrotis ipsilon); tolerance |
| | | to glyphosate and glufosinate- |
| | | ammonium containing herbicides. |
| BT11 × MIR162 | Syngenta Seeds, Inc. | Stacked insect resistant and |
| | | herbicide tolerant maize produced |
| | | by conventional cross breeding of |
| | | parental lines BT11 (OECD unique |
| | | identifier: SYN-BTO11-1) and |
| | | MIR162 (OECD unique identifier: |
| | | SYN-1R162-4). Resistance to the |
| | | European Corn Borer and |
| | | tolerance to the herbicide |
| | | glufosinate ammonium (Liberty) is |
| | | derived from BT11, which |
| | | contains the Cry1Ab gene from |
| | | Bacillus thuringiensis subsp. |
| | | kurstaki, and the phosphinothricin |
| | | N-acetyltransferase (PAT) |
| | | encoding gene from |
| | | S. viridochromogenes. Resistance to |
| | | other Lepidopteran pests, including |
| | | H. zea, S. frugiperda, A. ipsilon, |
| | | and S. albicosta, is derived from |
| | | MIR162, which contains the |
| | | vip3Aa gene from Bacillus |
| | | thuringiensis strain AB88. |
| BT11 × MIR162 × | Syngenta Seeds, Inc. | Bacillus thuringiensis Cry1Ab |
| MIR604 | | delta-endotoxin protein and the |
| | | genetic material necessary for its |
| | | production (via elements of vector |
| | | pZO1502) in Event Bt11 corn |
| | | (OECD Unique Identifier: |
| | | SYNBTO11-1) × Bacillus |
| | | thuringiensis Vip3Aa20 |
| | | insecticidal protein and the genetic |
| | | material necessary for its |
| | | production (via elements of vector |
| | | pNOV1300) in Event MIR162 |
| | | maize (OECD Unique Identifier: |
| | | SYN-IR162-4) × modified Cry3A |
| | | protein and the genetic material |
| | | necessary for its production (via |
| | | elements of vector pZM26) in |
| | | Event MIR604 corn (OECD |
| | | Unique Identifier: SYN-1R604-5). |
| CBH-351 | Aventis CropScience | Insect-resistant and glufosinate |
| | | ammonium herbicide tolerant |
| | | maize developed by inserting |
| | | genes encoding Cry9C protein |
| | | from Bacillus thuringiensis subsp |
| | | tolworthi and phosphinothricin |
| | | acetyltransferase (PAT) from |
| | | Streptomyces hygroscopicus. |
| DAS-06275-8 | DOW AgroSciences LLC | Lepidopteran insect resistant and |
| | | glufosinate ammonium herbicide- |
| | | tolerant maize variety produced by |
| | | inserting the Cry1F gene from |
| | | Bacillus thuringiensis var aizawai |
| | | and the phosphinothricin |
| | | acetyltransferase (PAT) from |
| | | Streptomyces hygroscopicus. |
| BT11 × MIR604 | Syngenta Seeds, Inc. | Stacked insect resistant and |
| | | herbicide tolerant maize produced |
| | | by conventional cross breeding of |
| | | parental lines BT11 (OECD unique |
| | | identifier: SYN-BTO11-1) and |
| | | MIR604 (OECD unique identifier: |
| | | SYN-1R6O5-5). Resistance to the |
| | | European Corn Borer and |
| | | tolerance to the herbicide |
| | | glufosinate ammonium (Liberty) is |
| | | derived from BT11, which |
| | | contains the Cry1Ab gene from |
| | | Bacillus thuringiensis subsp. |
| | | kurstaki, and the phosphinothricin |
| | | N-acetyltransferase (PAT) |
| | | encoding gene from |
| | | S. viridochromogenes. Corn |
| | | rootworm -resistance is derived |
| | | from MIR604 which contains the |
| | | mCry3A gene from Bacillus |
| | | thuringiensis. |
| BT11 × MIR604 × | Syngenta Seeds, Inc. | Stacked insect resistant and |
| GA21 | | herbicide tolerant maize produced |
| | | by conventional cross breeding of |
| | | parental lines BT11 (OECD unique |
| | | identifier: SYN-BTO11-1), |
| | | MIR604 (OECD unique identifier: |
| | | SYN-1R6O5-5) and GA21 (OECD |
| | | unique identifier: MON- |
| | | OOO21-9). Resistance to the |
| | | European Corn Borer and |
| | | tolerance to the herbicide |
| | | glufosinate ammonium (Liberty) is |
| | | derived from BT11, which |
| | | contains the Cry1Ab gene from |
| | | Bacillus thuringiensis subsp. |
| | | kurstaki, and the phosphinothricin |
| | | N-acetyltransferase (PAT) |
| | | encoding gene from |
| | | S. viridochromogenes. Corn |
| | | rootworm-resistance is derived |
| | | from MIR604 which contains the |
| | | mCry3A gene from Bacillus |
| | | thuringiensis. Tolerance to |
| | | glyphosate herbicide is derived |
| | | from GA21 which contains a a |
| | | modified EPSPS gene from maize. |
| DAS-59122-7 | DOW AgroSciences LLC | Corn rootworm-resistant maize |
| | and Pioneer Hi-Bred | produced by inserting the |
| | International Inc. | Cry34Ab1 and Cry35Ab1 genes |
| | | from Bacillus thuringiensis strain |
| | | PS149B1. The PAT encoding gene |
| | | from Streptomyces |
| | | viridochromogenes was introduced |
| | | as a selectable marker. |
| DAS-59122-7 × | DOW AgroSciences LLC | Stacked insect resistant and |
| TC1507 × NK603 | and Pioneer Hi-Bred | herbicide tolerant maize produced |
| | International Inc. | by conventional cross breeding of |
| | | parental lines DAS-59122-7 |
| | | (OECD unique identifier: DAS- |
| | | 59122-7) and TC1507 (OECD |
| | | unique identifier: DAS-01507-1) |
| | | with NK603 (OECD unique |
| | | identifier: MON-00603-6). Corn |
| | | rootworm-resistance is derived |
| | | from DAS-59122- 7 which |
| | | contains the Cry34Abl and |
| | | Cry35Abl genes from Bacillus |
| | | thuringiensis strain P5149B1. |
| | | Lepidopteran resistance and |
| | | tolerance to glufosinate ammonium |
| | | herbicide is derived from TC1507. |
| | | Tolerance to glyphosate herbicide |
| | | is derived from NK603. |
| DBT418 | Dekalb Genetics | Insect-resistant and glufosinate |
| | Corporation | ammonium herbicide tolerant |
| | | maize developed by inserting |
| | | genes encoding Cry1AC protein |
| | | from Bacillus thuringiensis subsp |
| | | kurstaki and phosphinothricin |
| | | acetyltransferase (PAT) from |
| | | Streptomyces hygroscopicus. |
| MIR604 × GA21 | Syngenta Seeds, Inc. | Stacked insect resistant and |
| | | herbicide tolerant maize produced |
| | | by conventional cross breeding of |
| | | parental lines MIR604 (OECD |
| | | unique identifier: SYN-1R605-5) |
| | | and GA21 (OECD unique |
| | | identifier: MON-00021-9). Corn |
| | | rootworm-resistance is derived |
| | | from MIR604 which contains the |
| | | mCry3A gene from Bacillus |
| | | thuringiensis. Tolerance to |
| | | glyphosate herbicide is derived |
| | | from GA21. |
| MON80100 | Monsanto Company | Insect-resistant maize produced by |
| | | inserting the Cry1Ab gene from |
| | | Bacillus thuringiensis subsp. |
| | | kurstaki. The genetic modification |
| | | affords resistance to attack by the |
| | | European corn borer (ECB). |
| MON802 | Monsanto Company | Insect-resistant and glyphosate |
| | | herbicide tolerant maize produced |
| | | by inserting the genes encoding the |
| | | Cry1Ab protein from Bacillus |
| | | thuringiensis and the 5- |
| | | enolpyruvylshikimate-3-phosphate |
| | | synthase (EPSPS) from |
| | | A. tumefaciens strain CP4. |
| MON809 | Pioneer Hi-Bred | Resistance to European corn borer |
| | International Inc. | (Ostrinia nubilalis) by introduction |
| | | of a synthetic Cry1Ab gene. |
| | | Glyphosate resistance via |
| | | introduction of the bacterial |
| | | version of a plant enzyme, |
| | | 5-enolpynivyl shikimate-3- |
| | | phosphate synthase (EPSPS). |
| MON810 | Monsanto Company | Insect-resistant maize produced by |
| | | inserting a truncated form of the |
| | | Cry1Ab gene from Bacillus |
| | | thuringiensis subsp. kurstaki HD-1. |
| | | The genetic modification affords |
| | | resistance to attack by the |
| | | European corn borer (ECB). |
| MON810 × LY038 | Monsanto Company | Stacked insect resistant and |
| | | enhanced lysine content maize |
| | | derived from conventional |
| | | crossbreeding of the parental lines |
| | | MON810 (OECD identifier: |
| | | MON-OO81O-6) and LY038 |
| | | (OECD identifier: REN-OOO38-3). |
| MON810 × MON88017 | Monsanto Company | Stacked insect resistant and |
| | | glyphosate tolerant maize derived |
| | | from conventional cross-breeding |
| | | of the parental lines MON810 |
| | | (OECD identifier: MON-OO81O- |
| | | 6) and MON88017 (OECD |
| | | identifier: MON-88017-3). |
| | | European corn borer (ECB) |
| | | resistance is derived from a |
| | | truncated form of the Cry1Ab gene |
| | | from Bacillus thuringiensis subsp. |
| | | kurstaki HD-1 present in |
| | | MON810. Corn rootworm |
| | | resistance is derived from the |
| | | Cry3Bbl gene from Bacillus |
| | | thuringiensis subspecies |
| | | kumamotoensis strain EG4691 |
| | | present in MON88017. Glyphosate |
| | | tolerance is derived from a 5- |
| | | enolpyruvylshikimate-3-phosphate |
| | | synthase (EPSPS) encoding gene |
| | | from Agrobacterium tumefaciens |
| | | strain CP4 present in MON88017. |
| MON832 | Monsanto Company | Introduction, by particle |
| | | bombardment, of glyphosate |
| | | oxidase (GOX) and a modified 5- |
| | | enolpyruvyl shikimate-3-phosphate |
| | | synthase (EPSPS), an enzyme |
| | | involved in the shikimate |
| | | biochemical pathway for the |
| | | production of the aromatic amino |
| | | acids. |
| MON863 | Monsanto Company | Corn rootworm resistant maize |
| | | produced by inserting the Cry3Bbl |
| | | gene from Bacillus thuringiensis |
| | | subsp. kumamotoensis. |
| MON863 × MON810 | Monsanto Company | Stacked insect resistant corn |
| | | hybrid derived from conventional |
| | | cross-breeding of the parental lines |
| | | MON863 (OECD identifier: |
| | | MON-00863-5) and MON810 |
| | | (OECD identifier: MON-00810-6) |
| MON863 × MON810 × | Monsanto Company | Stacked insect resistant and |
| Monsanto NK603 | | herbicide tolerant corn hybrid |
| | | derived from conventional |
| | | crossbreeding of the stacked |
| | | hybrid MON-00863-5 × MON- |
| | | 00810-6 and NK603 (OECD |
| | | identifier: MON-00603-6). |
| MON863 × NK603 | Monsanto Company | Stacked insect resistant and |
| | | herbicide tolerant corn hybrid |
| | | derived from conventional |
| | | crossbreeding of the parental lines |
| | | MON863 (OECD identifier: |
| | | MON-OO863-5) and NK603 |
| | | (OECD identifier: MON-OO6O3-6). |
| MON87460 | Monsanto Company | MON 87460 was developed to |
| | | provide reduced yield loss under |
| | | water-limited conditions compared |
| | | to conventional maize. Efficacy in |
| | | MON 87460 is derived by |
| | | expression of the inserted Bacillus |
| | | subtilis cold shock protein B |
| | | (CspB). |
| MON88017 | Monsanto Company | Corn rootworm-resistant maize |
| | | produced by inserting the Cry3Bbl |
| | | gene from Bacillus thuringiensis |
| | | subspecies kumamotoensis strain |
| | | EG4691. Glyphosate tolerance |
| | | derived by inserting a 5- |
| | | enolpyruvylshikimate-3-phosphate |
| | | synthase (EPSPS) encoding gene |
| | | from Agrobacterium tumefaciens |
| | | strain CP4. |
| MON89034 | Monsanto Company | Maize event expressing two |
| | | different insecticidal proteins from |
| | | Bacillus thuringiensis providing |
| | | resistance to number of |
| | | Lepidopteran pests. |
| MON89034 × | Monsanto Company | Stacked insect resistant and |
| MON88017 | | glyphosate tolerant maize derived |
| | | from conventional cross-breeding |
| | | of the parental lines MON89034 |
| | | (OECD identifier: MON-89O34-3) |
| | | and MON88017 (OECD identifier: |
| | | MON-88O17-3). Resistance to |
| | | Lepidopteran insects is derived |
| | | from two Cry genes present in |
| | | MON89043. Corn rootworm |
| | | resistance is derived from a single |
| | | Cry genes and glyphosate |
| | | tolerance is derived from the |
| | | 5-enolpyruvylshikimate-3- |
| | | phosphate synthase (EPSPS) |
| | | encoding gene from |
| | | Agrobacterium tumefaciens |
| | | present in MON88017. |
| MON89034 × NK603 | Monsanto Company | Stacked insect resistant and |
| | | herbicide tolerant maize produced |
| | | by conventional cross breeding of |
| | | parental lines MON89034 (OECD |
| | | identifier: MON-89034-3) with |
| | | NK603 (OECD unique identifier: |
| | | MON-00603-6). Resistance to |
| | | Lepidopteran insects is derived |
| | | from two Cry genes present in |
| | | MON89043. Tolerance to |
| | | glyphosate herbicide is derived |
| | | from NK603. |
| NK603 × MON810 | Monsanto Company | Stacked insect resistant and |
| | | herbicide tolerant corn hybrid |
| | | derived from conventional |
| | | crossbreeding of the parental lines |
| | | NK603 (OECD identifier: MON- |
| | | 00603-6) and MON810 (OECD |
| | | identifier: MON-00810-6). |
| MON89034 × TC1507 × | Monsanto Company and | Stacked insect resistant and |
| MON88017 × DAS- | Mycogen Seeds c/o Dow | herbicide tolerant maize produced |
| 59122-7 | AgroSciences LLC | by conventional cross breeding of |
| | | parental lines: MON89034, |
| | | TC1507, MON88017, and DAS-59 |
| | | 122. Resistance to the above- |
| | | ground and below-ground insect |
| | | pests and tolerance to glyphosate |
| | | and glufosinate-ammonium |
| | | containing herbicides. |
| M53 | Bayer CropScience | Male sterility caused by expression |
| | (Aventis | of the barnase ribonuclease gene |
| | CropScience(AgrEvo)) | from Bacillus amyloliquefaciens; |
| | | PPT resistance was via PPT- |
| | | acetyltransferase (PAT). |
| M56 | Bayer CropScience | Male sterility caused by expression |
| | (Aventis | of the barnase ribonuclease gene |
| | CropScience(AgrEvo) | from Bacillus amyloliquefaciens; |
| | | PPT resistance was via PPT- |
| | | acetyltransferase (PAT). |
| NK603 | Monsanto Company | Introduction, by particle |
| | | bombardment, of a modified 5- |
| | | enolpyruvyl shikimate-3-phosphate |
| | | synthase (EPSPS), an enzyme |
| | | involved in the shikimate |
| | | biochemical pathway for the |
| | | production of the aromatic amino |
| | | acids. |
| NK603 × T25 | Monsanto Company | Stacked glufosinate ammonium |
| | | and glyphosate herbicide tolerant |
| | | maize hybrid derived from |
| | | conventional cross-breeding of the |
| | | parental lines NK603 (OECD |
| | | identifier: MON-00603-6) and T25 |
| | | (OECD identifier: ACS-ZM003-2). |
| T25 × MON810 | Bayer CropScience | Stacked insect resistant and |
| | (Aventis | herbicide tolerant corn hybrid |
| | CropScience(AgrEvo)) | derived from conventional |
| | | crossbreeding of the parental lines |
| | | T25 (OECD identifier: ACS- |
| | | ZMOO3-2) and MON810 (OECD |
| | | identifier: MON-OO81O-6). |
| TC1507 | Mycogen (c/o Dow | Insect-resistant and glufosinate |
| | AgroSciences); Pioneer | ammonium herbicide tolerant |
| | (c/o DuPont) | maize produced by inserting the |
| | | Cry1F gene from Bacillus |
| | | thuringiensis var. aizawai and the |
| | | phosphinothricin |
| | | N-acetyltransferase encoding gene |
| | | from Streptomyces |
| | | viridochromogenes. |
| TC1507 × NK603 | DOW AgroSciences LLC | Stacked insect resistant and |
| | | herbicide tolerant corn hybrid |
| | | derived from conventional |
| | | crossbreeding of the parental lines |
| | | 1507 (OECD identifier: DAS- |
| | | O15O7-1) and NK603 (OECD |
| | | identifier: MON-OO6O3-6). |
| TC1507 × DAS-59122-7 | DOW AgroSciences LLC | Stacked insect resistant and |
| | and Pioneer Hi-Bred | herbicide tolerant maize produced |
| | International Inc. | by conventional cross breeding of |
| | | parental lines TC1507 (OECD |
| | | unique identifier: DAS-O15O7-1) |
| | | with DAS-59122-7 (OECD unique |
| | | identifier: DAS-59122-7). |
| | | Resistance to Lepidopteran insects |
| | | is derived from TC1507 due the |
| | | presence of the Cry1F gene from |
| | | Bacillus thuringiensis var. aizawai. |
| | | Corn rootworm-resistance is |
| | | derived from DAS-59122-7 which |
| | | contains the Cry34Ab1 and |
| | | Cry35Ab1 genes from Bacillus |
| | | thuringiensis strain P5149B1. |
| | | Tolerance to glufosinate |
| | | ammonium herbicide is derived |
| | | from TC1507 from the |
| | | phosphinothricin |
| | | N-acetyltransferase encoding gene |
| | | from Streptomyces viridochromogenes. |

| Event | Company | Description | Hybrid Family |
|---|---|---|---|
| P0157 | Dupont Pioneer | | P0157 |
| P0157AM | Dupont Pioneer | AM LL RR2 | P0157 |
| P0157AMXT | Dupont Pioneer | AMXT LL RR2 | P0157 |
| P0157R | Dupont Pioneer | RR2 | P0157 |
| P0339AM | Dupont Pioneer | AM LL RR2 | P0339 |
| P0339AMXT | Dupont Pioneer | AMXT LL RR2 | P0339 |
| P0306AM | Dupont Pioneer | AM LL RR2 | P0306 |
| P0589 | Dupont Pioneer | | P0589 |
| P0589AM | Dupont Pioneer | AM LL RR2 | P0589 |
| P0589AMXT | Dupont Pioneer | AMXT LL RR2 | P0589 |
| P0589R | Dupont Pioneer | RR2 | P0589 |
| P0574 | Dupont Pioneer | | P0574 |
| P0574AM | Dupont Pioneer | AM LL RR2 | P0574 |
| P0574AMXT | Dupont Pioneer | AMXT LL RR2 | P0574 |
| P0533EXR | Dupont Pioneer | HXX LL RR2 | P0533 |
| P0506AM | Dupont Pioneer | AM LL RR2 | P0566 |
| P0760AMXT | Dupont Pioneer | AMXT LL RR2 | P0760 |
| P0707AM | Dupont Pioneer | AM LL RR2 | P0707 |
| P0707AMXT | Dupont Pioneer | AMXT LL RR2 | P0707 |
| P0825AM | Dupont Pioneer | AM LL RR2 | P0825 |
| P0825AMXT | Dupont Pioneer | AMXT LL RR2 | P0825 |
| P0969AM | Dupont Pioneer | AM LL RR2 | P0969 |
| P0969AMXT | Dupont Pioneer | AMXT LL RR2 | P0969 |
| P0937AM | Dupont Pioneer | AM LL RR2 | P0937 |
| P0919AM | Dupont Pioneer | AM LL RR2 | P0919 |
| P0905EXR | Dupont Pioneer | HXX LL RR2 | P0905 |
| P1197 | Dupont Pioneer | | P1197 |
| P1197AM | Dupont Pioneer | AM LL RR2 | P1197 |
| P1197AMXT | Dupont Pioneer | AMXT LL RR2 | P1197 |
| P1197R | Dupont Pioneer | RR2 | P1197 |
| P1151 | Dupont Pioneer | | P1151 |
| P1151AM | Dupont Pioneer | AM LL RR2 | P1151 |
| P1151R | Dupont Pioneer | RR2 | P1151 |
| P1138AM | Dupont Pioneer | AM LL RR2 | P1138 |
| P1366AM | Dupont Pioneer | AM LL RR2 | P1366 |
| P1366AMXT | Dupont Pioneer | AMXT LL RR2 | P1366 |
| P1365AMX | Dupont Pioneer | AMX LL RR2 | P1365 |
| P1353AM | Dupont Pioneer | AM LL RR2 | P1353 |
| P1345 | Dupont Pioneer | | P1345 |
| P1311AMXT | Dupont Pioneer | AMXT LL RR2 | P1311 |
| P1498EHR | Dupont Pioneer | HX1 LL RR2 | P1498 |
| P1498R | Dupont Pioneer | RR2 | P1498 |
| P1443AM | Dupont Pioneer | AM LL RR2 | P1443 |
| P1555CHR | Dupont Pioneer | RW HX1 LL RR2 | P1555 |
| P1751AMT | Dupont Pioneer | AMT LL RR2 | P1751 |
| P2089AM | Dupont Pioneer | AM LL RR2 | P2089 |
| QROME | Dupont Pioneer | Q LL RR2 | |

[0435] The following are the definitions for the shorthand occurring in Table 19. AM—OPTIMUM ACREMAX Insect Protection system with YGCB, HX1, LL, AMT—OPTIMUM ACREMAX TRISECT insect Protection System with RW, YGCB, HX1, LL, RR2. AMXT—(OPTIMUM ACREMAX XTreme). HXX—HERCULEX XTRA contains the Herculex I and Herculex RW genes. HX—Contains the HERCULEX 1 Insect Protection gene which provides protection against European corn borer, southwestern corn borer, black cutworm, fill armyworm, western bean cutworm, lesser corn stalk borer, southern corn stalk borer, and sugarcane borer; and suppresses corn earworm. LL—Contains the LIBERTYLINK gene for resistance to LIBERTY herbicide. RR2—Contains the ROUNDUP READY Corn 2 trait that provides crop safety for over-the-top applications of labeled glyphosate herbicides when applied according to label directions. YGCB—contains the YIELDGARD Corn Borer gene offers a high level of resistance to European corn borer, southwestern corn borer, and southern cornstalk borer; moderate resistance to corn earworm and common stalk borer; and above average resistance to fall armyworm. RW—contains the AGRISURE rootworm resistance trait. Q—provides protection or suppression against susceptible European corn borer, southwestern corn borer, black cutworm, fall armyworm, lesser corn stalk borer, southern corn stalk borer, stalk borer, sugarcane borer, and corn earworm; and also provides protection from larval injury caused by susceptible western corn rootworm, northern corn rootworm, and Mexican corn rootworm; contains (1) HERCULEX XTRA insect Protection genes that produce Cry1F and Cry34ab1 and Cry35ab1 proteins, (2) AGRISURE RW trait that includes a gene that produces mCry3A protein, and (3) YIELDGARD Corn Borer gene which produces Cry1 Ab protein.

### Concentrations and Rates of Application of Agricultural Compositions

[0436] As aforementioned, the agricultural compositions of the present disclosure, which comprise a taught microbe, can be applied to plants in a multitude of ways. In two particular aspects, the disclosure contemplates an in-furrow treatment or a seed treatment

[0437] For seed treatment embodiments, the microbes of the disclosure can be present on the seed in a variety of concentrations. For example, the microbes can be found in a seed treatment at a cfu concentration, per seed of: 1×10¹, 1×10², 1×10³, 1×10⁴, 1×10⁵, 1×10⁶, 1×10⁷, 1×10⁸, 1×10⁹, 1×10¹⁰, or more. In particular aspects, the seed treatment compositions comprise about 1×10⁴ to about 1×10⁸ cfu per seed. In other particular aspects, the seed treatment compositions comprise about 1×10⁵ to about 1×10⁷ cfu per seed. In other aspects, the seed treatment compositions comprise about 1×10⁶ cfu per seed.

[0438] In the United States, about 10% of corn acreage is planted at a seed density of above about 36,000 seeds per acre; ⅓ of the corn acreage is planted at a seed density of between about 33,000 to 36,000 seeds per acre; ⅓ of the corn acreage is planted at a seed density of between about 30,000 to 33,000 seeds per acre, and the remainder of the acreage is variable. See, “Corn Seeding Rate Considerations,” written by Steve Butzen, available at: www.pioneer.com/home/site/us/agronomy/library/corn-seeding-rate-considerations/.

[0439] Table 20 below utilizes various cfu concentrations per seed in a contemplated seed treatment embodiment (rows across) and various seed acreage planting densities (1^{st} column: 15K-41K) to calculate the total amount of cfu per acre, which would be utilized in various agricultural scenarios (i.e. seed treatment concentration per seed×seed density planted per acre). Thus, if one were to utilize a seed treatment with 1×10⁶ cfu per seed and plant 30,000 seeds per acre, then the total cfu content per acre would be 3×10¹⁰ (i.e. 30K*1×10⁶).

TABLE 20
Total CFU Per Acre Calculation for Seed Treatment Embodiments

| Corn Population | | | | | | | | |
|---|---|---|---|---|---|---|---|---|
| (i.e. seeds per acre) | 1.00E+02 | 1.00E+03 | 1.00E+04 | 1.00E+05 | 1.00E+06 | 1.00E+07 | 1.00E+08 | 1.00E+09 |
| 15,000 | 1.50E+06 | 1.50E+07 | 1.50E+08 | 1.50E+09 | 1.50E+10 | 1.50E+11 | 1.50E+12 | 1.50E+13 |
| 16,000 | 1.60E+06 | 1.60E+07 | 1.60E+08 | 1.60E+09 | 1.60E+10 | 1.60E+11 | 1.60E+12 | 1.60E+13 |
| 17,000 | 1.70E+06 | 1.70E+07 | 1.70E+08 | 1.70E+09 | 1.70E+10 | 1.70E+11 | 1.70E+12 | 1.70E+13 |
| 18,000 | 1.80E+06 | 1.80E+07 | 1.80E+08 | 1.80E+09 | 1.80E+10 | 1.80E+11 | 1.80E+12 | 1.80E+13 |
| 19,000 | 1.90E+06 | 1.90E+07 | 1.90E+08 | 1.90E+09 | 1.90E+10 | 1.90E+11 | 1.90E+12 | 1.90E+13 |
| 20,000 | 2.00E+06 | 2.00E+07 | 2.00E+08 | 2.00E+09 | 2.00E+10 | 2.00E+11 | 2.00E+12 | 2.00E+13 |
| 21,000 | 2.10E+06 | 2.10E+07 | 2.10E+08 | 2.10E+09 | 2.10E+10 | 2.10E+11 | 2.10E+12 | 2.10E+13 |
| 22,000 | 2.20E+06 | 2.20E+07 | 2.20E+08 | 2.20E+09 | 2.20E+10 | 2.20E+11 | 2.20E+12 | 2.20E+13 |
| 23,000 | 2.30E+06 | 2.30E+07 | 2.30E+08 | 2.30E+09 | 2.30E+10 | 2.30E+11 | 2.30E+12 | 2.30E+13 |
| 24,000 | 2.40E+06 | 2.40E+07 | 2.40E+08 | 2.40E+09 | 2.40E+10 | 2.40E+11 | 2.40E+12 | 2.40E+13 |
| 25,000 | 2.50E+06 | 2.50E+07 | 2.50E+08 | 2.50E+09 | 2.50E+10 | 2.50E+11 | 2.50E+12 | 2.50E+13 |
| 26,000 | 2.60E+06 | 2.60E+07 | 2.60E+08 | 2.60E+09 | 2.60E+10 | 2.60E+11 | 2.60E+12 | 2.60E+13 |
| 27,000 | 2.70E+06 | 2.70E+07 | 2.70E+08 | 2.70E+09 | 2.70E+10 | 2.70E+11 | 2.70E+12 | 2.70E+13 |
| 28,000 | 2.80E+06 | 2.80E+07 | 2.80E+08 | 2.80E+09 | 2.80E+10 | 2.80E+11 | 2.80E+12 | 2.80E+13 |
| 29,000 | 2.90E+06 | 2.90E+07 | 2.90E+08 | 2.90E+09 | 2.90E+10 | 2.90E+11 | 2.90E+12 | 2.90E+13 |
| 30,000 | 3.00E+06 | 3.00E+07 | 3.00E+08 | 3.00E+09 | 3.00E+10 | 3.00E+11 | 3.00E+12 | 3.00E+13 |
| 31,000 | 3.10E+06 | 3.10E+07 | 3.10E+08 | 3.10E+09 | 3.10E+10 | 3.10E+11 | 3.10E+12 | 3.10E+13 |
| 32,000 | 3.20E+06 | 3.20E+07 | 3.20E+08 | 3.20E+09 | 3.20E+10 | 3.20E+11 | 3.20E+12 | 3.20E+13 |
| 33,000 | 3.30E+06 | 3.30E+07 | 3.30E+08 | 3.30E+09 | 3.30E+10 | 3.30E+11 | 3.30E+12 | 3.30E+13 |
| 34,000 | 3.40E+06 | 3.40E+07 | 3.40E+08 | 3.40E+09 | 3.40E+10 | 3.40E+11 | 3.40E+12 | 3.40E+13 |
| 35,000 | 3.50E+06 | 3.50E+07 | 3.50E+08 | 3.50E+09 | 3.50E+10 | 3.50E+11 | 3.50E+12 | 3.50E+13 |
| 36,000 | 3.60E+06 | 3.60E+07 | 3.60E+08 | 3.60E+09 | 3.60E+10 | 3.60E+11 | 3.60E+12 | 3.60E+13 |
| 37,000 | 3.70E+06 | 3.70E+07 | 3.70E+08 | 3.70E+09 | 3.70E+10 | 3.70E+11 | 3.70E+12 | 3.70E+13 |
| 38,000 | 3.80E+06 | 3.80E+07 | 3.80E+08 | 3.80E+09 | 3.80E+10 | 3.80E+11 | 3.80E+12 | 3.80E+13 |
| 39,000 | 3.90E+06 | 3.90E+07 | 3.90E+08 | 3.90E+09 | 3.90E+10 | 3.90E+11 | 3.90E+12 | 3.90E+13 |
| 40,000 | 4.00E+06 | 4.00E+07 | 4.00E+08 | 4.00E+09 | 4.00E+10 | 4.00E+11 | 4.00E+12 | 4.00E+13 |
| 41,000 | 4.10E+06 | 4.10E+07 | 4.10E+08 | 4.10E+09 | 4.10E+10 | 4.10E+11 | 4.10E+12 | 4.10E+13 |

[0440] For in-furrow embodiments, the microbes of the disclosure can be applied at a cfu concentration per acre of: 1×10⁶, 3.20×10¹⁰, 1.60×10¹¹, 3.20×10¹¹, 8.0×10¹¹, 1.6×10¹², 3.20×10¹², or more. Therefore, in aspects, the liquid in-furrow compositions can be applied at a concentration of between about 1×10⁶ to about 3×10¹² cfu per acre.

[0441] In some aspects, the in-furrow compositions are contained in a liquid formulation. In the liquid in-furrow embodiments, the microbes can be present at a cfu concentration per milliliter of: 1×10¹, 1×10², 1×10³, 1×10⁴, 1×10⁵, 1×10⁶, 1×10⁷, 1×10⁸, 1×10⁹, 1×10¹⁰, 1×10¹¹, 1×10¹², 1×10¹³, or more. In certain aspects, the liquid in-furrow compositions comprise microbes at a concentration of about 1×10⁶ to about 1×10¹¹ cfu per milliliter. In other aspects, the liquid in-furrow compositions comprise microbes at a concentration of about 1×10⁷ to about 1×10¹⁰ cfu per milliliter. In other aspects, the liquid in-furrow compositions comprise microbes at a concentration of about 1×10⁸ to about 1×10⁹ cfu per milliliter. In other aspects, the liquid in-furrow compositions comprise microbes at a concentration of up to about 1×10¹³ cfu per milliliter.

### Transcriptomic Profiling of Candidate Microbes

[0442] Previous work by the inventors entailed transcriptomic profiling of strain CI010 to identify promoters that are active in the presence of environmental nitrogen. Strain CI010 was cultured in a defined, nitrogen-free media supplemented with 10 mM glutamine. Total RNA was extracted from these cultures (QIAGEN RNeasy kit) and subjected to RNAseq sequencing via Illumina HiSeq (SeqMatic, Fremont Calif.). Sequencing reads were mapped to the CI010 genome data using Geneious, and highly expressed genes under control of proximal transcriptional promoters were identified.

[0443] Tables 21-23 lists genes and their relative expression level as measured through RNASeq sequencing of total RNA. Sequences of the proximal promoters were recorded for use in mutagenesis of nif pathways, nitrogen utilization related pathways, or other genes with a desired expression level.

TABLE 21

| Name | Minimum | Maximum | Length | Direction |
|---|---|---|---|---|
| murein lipoprotein CDS | 2,929,898 | 2,930,134 | 237 | forward |
| membrane protein CDS | 5,217,517 | 5,217,843 | 327 | forward |
| zinc/cadmium-binding | 3,479,979 | 3,480,626 | 648 | forward |
| protein CDS | | | | |
| acyl carrier protein CDS | 4,563,344 | 4,563,580 | 237 | reverse |
| ompX CDS | 4,251,002 | 4,251,514 | 513 | forward |
| DNA-binding protein | 375,156 | 375,428 | 273 | forward |
| HU-beta CDS | | | | |
| sspA CDS | 629,998 | 630,636 | 639 | reverse |
| taffi CDS | 3,199,435 | 3,199,638 | 204 | reverse |
| LexA repressor CDS | 1,850,457 | 1,851,065 | 609 | forward |
| hisS CDS | <3999979 | 4,001,223 | >1245 | forward |

TABLE 22

| | Differential | | | | | |
|---|---|---|---|---|---|---|
| | Expression | Differential | RNASeq_nifL - | RNASeq_nifL - | RNASeq_WT - | RNASeq_WT - |
| | Absolute | Expression | Raw Read | Raw Transcript | Raw Read | Raw Transcript |
| Name | Confidence | Ratio | Count | Count | Count | Count |
| murein | 1000 | −1.8 | 12950.5 | 10078.9 | 5151.5 | 4106.8 |
| lipoprotein | | | | | | |
| CDS | | | | | | |
| membrane | 1000 | −1.3 | 9522.5 | 5371.3 | 5400 | 3120 |
| protein CDS | | | | | | |
| zinc/cadmium- | 3.3 | 1.1 | 6461 | 1839.1 | 5318 | 1550.6 |
| binding | | | | | | |
| protein CDS | | | | | | |
| acyl carrier | 25.6 | 1.6 | 1230.5 | 957.6 | 1473.5 | 1174.7 |
| protein CDS | | | | | | |
| ompX CDS | 1.7 | 1.1 | 2042 | 734.2 | 1687.5 | 621.5 |
| DNA-binding | 6.9 | −1.3 | 1305 | 881.7 | 725 | 501.8 |
| protein HU- | | | | | | |
| beta CDS | | | | | | |
| sspA CDS | 0.2 | 1 | 654 | 188.8 | 504.5 | 149.2 |
| tatE CDS | 1.4 | 1.3 | 131 | 118.4 | 125 | 115.8 |
| LexA | 0.1 | −1.1 | 248 | 75.1 | 164 | 50.9 |
| repressor CDS | | | | | | |
| hisS CDS | 0 | −1.1 | 467 | 69.2 | 325 | 49.3 |

TABLE 23

| | Prm | | |
|---|---|---|---|
| | (In Forward | | |
| | direction, −250 | Expressed | Neighbor |
| | to +10 region) | Sequence | Sequence |
| Name | SEQ ID NO: | SEQ ID NO: | SEQ ID NO: |
| murein lipoprotein CDS | SEQ ID NO: 3 | SEQ ID NO: 13 | SEQ ID NO: 23 |
| membrane protein CDS | SEQ ID NO: 4 | SEQ ID NO: 14 | SEQ ID NO: 24 |
| zinc/cadmium-binding | SEQ ID NO: 5 | SEQ ID NO: 15 | SEQ ID NO: 25 |
| protein CDS | | | |
| acyl carrier protein CDS | SEQ ID NO: 6 | SEQ ID NO: 16 | SEQ ID NO: 26 |
| ompX CDS | SEQ ID NO: 7 | SEQ ID NO: 17 | SEQ ID NO. 27 |
| DNA-binding protein | SEQ ID NO: 8 | SEQ ID NO: 18 | SEQ ID NO: 28 |
| HU-beta CDS | | | |
| sspA CDS | SEQ ID NO: 9 | SEQ ID NO: 19 | SEQ ID NO: 29 |
| tatE CDS | SEQ ID NO: 10 | SEQ ID NO: 20 | SEQ ID NO: 30 |
| LexA repressor CDS | SEQ ID NO: 11 | SEQ ID NO: 21 | SEQ ID NO: 31 |
| hisS CDS | SEQ ID NO: 12 | SEQ ID NO: 22 | SEQ ID NO: 32 |

TABLE 24
Table of Strains

| | | Mutagenic DNA | | Gene 1 | Gene 2 |
|---|---|---|---|---|---|
| Name | Lineage | Description | Genotype | mutation | mutation |
| CI006 | Isolated strain from | None | WT | | |
| | Enterobacter (now | | | | |
| | Kosakonia) genera | | | | |
| CI008 | Isolated strain from | None | WT | | |
| | Burkholderia (now | | | | |
| | Paraburkholderia) | | | | |
| | genera | | | | |
| CI010 | Isolated strain from | None | WT | | |
| | Klebsiella genera | | | | |
| CI019 | Isolated strain from | None | WT | | |
| | Rahnella genera | | | | |
| CI028 | Isolated strain from | None | WT | | |
| | Enterobacter genera | | | | |
| CI050 | Isolated strain from | None | WT | | |
| | Klebsiella genera | | | | |
| CM002 | Mutant of CI050 | Disruption of nifL gene | ΔnifL::KanR | SEQ ID | |
| | | with a kanamycin resistance | | NO: 33 | |
| | | expression cassette (KanR) | | | |
| | | encoding the | | | |
| | | aminoglycoside O- | | | |
| | | phosphotransferase gene | | | |
| | | aph1 inserted. | | | |
| CM011 | Mutant of CI019 | Disruption of nifL gene | ΔnifL::SpecR | SEQ ID | |
| | | with a spectinomycin | | NO: 34 | |
| | | resistance expression | | | |
| | | cassette (SpecR) encoding | | | |
| | | the streptomycin 3″-O- | | | |
| | | adenylyltransferase gene | | | |
| | | aadA inserted. | | | |
| CM013 | Mutant of CI006 | Disruption of nifL gene | ΔnifL::KanR | SEQ ID | |
| | | with a kanamycin resistance | | NO: 35 | |
| | | expression cassette (KanR) | | | |
| | | encoding the | | | |
| | | aminoglycoside O- | | | |
| | | phosphotransferase gene | | | |
| | | aph1 inserted. | | | |
| CM004 | Mutant of CI010 | Disruption of amtB gene | ΔamtB::KanR | SEQ ID | |
| | | with a kanamycin resistance | | NO: 36 | |
| | | expression cassette (KanR) | | | |
| | | encoding the | | | |
| | | aminoglycoside O- | | | |
| | | phosphotransferase gene | | | |
| | | aph1 inserted. | | | |
| CM005 | Mutant of CI010 | Disruption of nifL gene | ΔnifL::KanR | SEQ ID | |
| | | with a kanamycin resistance | | NO: 37 | |
| | | expression cassette (KanR) | | | |
| | | encoding the | | | |
| | | aminoglycoside O- | | | |
| | | phosphotransferase gene | | | |
| | | aph1 inserted. | | | |
| CM015 | Mutant of CI006 | Disruption of nifL gene | ΔnifL::Prm5 | SEQ ID | |
| | | with a fragment of the | | NO: 38 | |
| | | region upstream of the | | | |
| | | ompX gene inserted (Prm5). | | | |
| CM021 | Mutant of CI006 | Disruption of nifL gene | ΔnifL::Prm2 | SEQ ID | |
| | | with a fragment of the | | NO: 39 | |
| | | region upstream of an | | | |
| | | unannotated gene and the | | | |
| | | first 73 bp of that gene | | | |
| | | inserted (Prm2). | | | |
| CM023 | Mutant of CI006 | Disruption of nifL gene | ΔnifL::Prm4 | SEQ ID | |
| | | with a fragm ent of the | | NO: 40 | |
| | | region upstream of the acpP | | | |
| | | gene and the first 121 bp of | | | |
| | | the acpP gene inserted | | | |
| | | (Prm4). | | | |
| CM014 | Mutant of CI006 | Disruption of nifL gene | ΔnifL::Prm1 | SEQ ID | |
| | | with a fragment of the | | NO: 41 | |
| | | region upstream of the lpp | | | |
| | | gene and the first 29 bp of | | | |
| | | the lpp gene inserted | | | |
| | | (Prm1). | | | |
| CM016 | Mutant of CI006 | Disruption of nifL gene | ΔnifL::Prm9 | SEQ ID | |
| | | with a fragment of the | | NO: 42 | |
| | | region upstream of the lexA | | | |
| | | 3 gene and the first 21 bp of | | | |
| | | the lexA 3 gene inserted | | | |
| | | (Prm9). | | | |
| CM022 | Mutant of CI006 | Disruption of nifL gene | ΔnifL::Prm3 | SEQ ID | |
| | | with a fragment of the | | NO: 43 | |
| | | region upstream of the mntP | | | |
| | | 1 gene and the first 53 bp of | | | |
| | | the mntP 1 gene inserted | | | |
| | | (Prm3). | | | |
| CM024 | Mutant of CI006 | Disruption of nifL gene | ΔnifL::Prm7 | SEQ ID | |
| | | with a fragment of the | | NO: 44 | |
| | | region upstream of the sspA | | | |
| | | gene inserted (Prm7). | | | |
| CM025 | Mutant of CI006 | Disruption of nifL gene | ΔnifL::Prm10 | SEQ ID | |
| | | with a fragment of the | | NO: 45 | |
| | | region upstream of the hisS | | | |
| | | gene and the first 52 bp of | | | |
| | | the hisS gene inserted | | | |
| | | (Prm10). | | | |
| CM006 | Mutant of CI010 | Disruption of glnB gene | ΔglnB::KanR | SEQ ID | |
| | | with a kanamycin resistance | | NO: 46 | |
| | | expression cassette (KanR) | | | |
| | | encoding the | | | |
| | | aminoglycoside O- | | | |
| | | phosphotransferase gene | | | |
| | | aph1 inserted. | | | |
| CM017 | Mutant of CI028 | Disruption of nifL gene | ΔnifL::KanR | SEQ ID | |
| | | with a kanamycin resistance | | NO: 47 | |
| | | expression cassette (KanR) | | | |
| | | encoding the | | | |
| | | aminoglycoside O- | | | |
| | | phosphotransferase gene | | | |
| | | aph1 inserted. | | | |
| CM011 | Mutant of CI019 | Disruption of nifL gene | ΔnifL::SpecR | SEQ ID | |
| | | with a spectinomycin | | NO: 48 | |
| | | resistance expression | | | |
| | | cassette (SpecR) encoding | | | |
| | | the streptomycin 3″-O- | | | |
| | | adenylyltransferase gene | | | |
| | | aadA inserted. | | | |
| CM013 | Mutant of CI006 | Disruption of nifL gene | ΔnifL::KanR | SEQ ID | |
| | | with a kanamycin resistance | | NO: 49 | |
| | | expression cassette (KanR) | | | |
| | | encoding the | | | |
| | | aminoglycoside O- | | | |
| | | phosphotransferase gene | | | |
| | | aph1 inserted. | | | |
| CM005 | Mutant of CI010 | Disruption of nifL gene | ΔnifL::KanR | SEQ ID | |
| | | with a kanamycin resistance | | NO: 50 | |
| | | expression cassette (KanR) | | | |
| | | encoding the | | | |
| | | aminoglycoside O- | | | |
| | | phosphotransferase gene | | | |
| | | aph1 inserted. | | | |
| CM014 | Mutant of CI006 | Disruption of nifL gene | ΔnifL::Prm1 | SEQ ID | |
| | | with a fragment of the | | NO: 51 | |
| | | region upstream of the lpp | | | |
| | | gene and the first 29 bp of | | | |
| | | the lpp gene inserted | | | |
| | | (Prm1). | | | |
| CM015 | Mutant of CI006 | Disruption of nifL gene | ΔnifL::Prm5 | SEQ ID | |
| | | with a fragment of the | | NO: 52 | |
| | | region upstream of the | | | |
| | | ompX gene inserted (Pnn5). | | | |
| CM023 | Mutant of CI006 | Disruption of nifL gene | ΔnifL::Prm4 | SEQ ID | |
| | | with a fragment of the | | NO: 53 | |
| | | region upstream of the acpP | | | |
| | | gene and the first 121 bp of | | | |
| | | the acpP gene inserted | | | |
| | | (Prm4). | | | |
| CM029 | Mutant of CI006 | Disruption of nifL gene | ΔnifL::Prm5 | SEQ ID | SEQ ID |
| | | with a fragment of the | ΔglnE- | NO: 54 | NO: 61 |
| | | region upstream of the | AR_KO1 | | |
| | | ompX gene inserted (Prm5) | | | |
| | | and deletion of the 1287 bp | | | |
| | | after the start codon of the | | | |
| | | glnE gene containing the | | | |
| | | adenylyl-removing domain | | | |
| | | of glutamate-ammonia- | | | |
| | | ligase adenylyltransferase | | | |
| | | (ΔglnE-AR_KO1). | | | |
| CM014 | Mutant of CI006 | Disruption of nifL gene | ΔnifL::Prm1 | SEQ ID | |
| | | with a fragment of the | | NO: 55 | |
| | | region upstream of the lpp | | | |
| | | gene and the first 29 bp of | | | |
| | | the lpp gene inserted | | | |
| | | (Prm1). | | | |
| CM011 | Mutant of CI019 | Disruption of nifL gene | ΔnifL::SpecR | SEQ ID | |
| | | with a spectinomycin | | NO: 56 | |
| | | resistance expression | | | |
| | | cassette (SpecR) encoding | | | |
| | | the streptomycin 3″-O- | | | |
| | | adenylyltransferase gene | | | |
| | | aadA inserted. | | | |
| CM011 | Mutant of CI019 | Disruption of nifL gene | ΔnifL::SpecR | SEQ ID | |
| | | with a spectinomycin | | NO: 57 | |
| | | resistance expression | | | |
| | | cassette (SpecR) encoding | | | |
| | | the streptomycin 3″-O- | | | |
| | | adenylyltransferase gene | | | |
| | | aadA inserted. | | | |
| CM013 | Mutant of CI006 | Disruption of nifL gene | ΔnifL::KanR | SEQ ID | |
| | | with a kanamycin resistance | | NO: 58 | |
| | | expression cassette (KanR) | | | |
| | | encoding the | | | |
| | | aminoglycoside O- | | | |
| | | phosphotransferase gene | | | |
| | | aph1 inserted. | | | |
| CM011 | Mutant of CI019 | Disruption of nifL gene | ΔnifL::SpecR | SEQ ID | |
| | | with a spectinomycin | | NO: 59 | |
| | | resistance expression | | | |
| | | cassette (SpecR) encoding | | | |
| | | the streptomycin 3″-O- | | | |
| | | adenylyltransferase gene | | | |
| | | aadA inserted. | | | |
| CM011 | Mutant of CI019 | Disruption of nifL gene | ΔnifL::SpecR | SEQ ID | |
| | | with a spectinomycin | | NO: 60 | |
| | | resistance expression | | | |
| | | cassette (SpecR) encoding | | | |
| | | the streptomycin 3″-O- | | | |
| | | adenylyltransferase gene | | | |
| | | aadA inserted. | | | |

### EXAMPLES

[0444] The following examples are given for the purpose of illustrating various embodiments of the disclosure and are not meant to limit the present disclosure in any fashion. Changes therein and other uses which are encompassed within the spirit of the disclosure, as defined by the scope of the claims, will be recognized by those skilled in the art.

### Example 1: Guided Microbial Remodeling—a Platform for the Rational Improvement of Microbial Species for Agriculture

[0445] An example overview of an embodiment of the Guided Microbial Remodeling (GMR) platform can be summarized in the schematic of FIG. 1A.

[0446] FIG. 1A illustrates that the composition of the microbiome can first be characterized and a species of interest is identified (e.g. to find a microbe with the appropriate colonization characteristics).

[0447] The metabolism of the species of interest can be mapped and linked to genetics. For example, the nitrogen fixation pathway of the microbe can be characterized. The pathway that is being characterized can be examined under a range of environmental conditions. For example, the microbe's ability to fix atmospheric nitrogen in the presence of various levels of exogenous nitrogen in its environment can be examined. The metabolism of nitrogen can involve the entrance of ammonia (NH₄⁺) from the rhizosphere into the cytosol of the bacteria via the AmtB transporter. Ammonia and L-glutamate (L-Glu) are catalyzed by glutamine synthetase and ATP into glutamine. Glutamine can lead to the formation of bacterial biomass and it can also inhibit expression of the nif operon, i.e. it can be a competing force when one desires the microbe to fix atmospheric nitrogen and excrete ammonia. The nitrogen fixation pathway is characterized in great detail in earlier sections of the specification.

[0448] Afterwards, a targeted non-intergeneric genomic alteration can be introduced to the microbe's genome, using methods including, but not limited to: conjugation and recombination, chemical mutagenesis, adaptive evolution, and gene editing. The targeted non-intergeneric genomic alteration can include an insertion, disruption, deletion, alteration, perturbation, modification, etc. of the genome.

[0449] Derivative remodeled microbes, which comprise the desired phenotype resulting from the remodeled underlying genotype, are then used to inoculate crops.

[0450] The present disclosure provides, in certain embodiments, non-intergeneric remodeled microbes that are able to fix atmospheric nitrogen and supply such nitrogen to a plant. In aspects, these non-intergeneric remodeled microbes are able to fix atmospheric nitrogen, even in the presence of exogenous nitrogen.

[0451] FIG. 1B depicts an expanded view of the measurement of the microbiome step. In some embodiments, the present disclosure finds microbial species that have desired colonization characteristics, and then utilizes those species in the subsequent remodeling process.

[0452] The aforementioned Guided Microbial Remodeling (GMR) platform will now be described with more specificity.

[0453] In aspects, the GMR platform comprises the following steps:
[0454] A. Isolation—Obtain microbes from the soil, rhizosphere, surface, etc. of a crop plant of interest;
[0455] B. Characterization—Involves characterizing the isolated microbes for genotype/phenotypes of interest (e.g. genome sequence, colonization ability, nitrogen fixation activity, solubilization of P ability, excretion of a metabolite of interest, excretion of a plant promoting compound, etc.)
[0456] C. Domestication—Development of a molecular protocol for non-intergeneric genetic modification of the microbe;
[0457] D. Non-Intergeneric Engineering Campaign and Optimization—Generation of derivative non-intergeneric microbial strains with genetic modifications in key pathways (e.g. colonization associated genes, nitrogen fixation/assimilation genes, P solubilization genes);
[0458] E. Analytics—Evaluation of derived non-intergeneric strains for phenotypes of interest both in vitro (e.g., ARA assays) and in planta (e.g. colonization assays).
[0459] F. Iterate Engineering Campaign/Analytics—Iteration of steps D and E for further improvement of microbial strain.

[0460] Each of the GMR platform process steps will now be elaborated upon below.

### A. Isolation of Microbes

[0461] 1. Obtain a Soil Sample

[0462] Microbes will be isolated from soil and/or roots of a plant. In one example, plants will be grown in a laboratory or a greenhouse in small pots. Soil samples will be obtained from various agricultural areas. For example, soils with diverse texture characteristics can be collected, including loam (e.g. peaty clay loam, sandy loam), clay soil (e.g. heavy clay, silty clay), sandy soil, silty soil, peaty soil, chalky soil, and the like.

[0463] 2. Grow Bait Plants

[0464] Seeds of a bait plant (a plant of interest) (e.g. corn, wheat, rice, sorghum, millet, soybean, vegetables, fruits, etc.) will be planted into each soil type. In one example, different varieties of a bait plant will be planted in various soil types. For example, if the plant of interest is corn, seeds of different varieties of corn such as field corn, sweet corn, heritage corn, etc. will be planted in various soil types described above.

[0465] 3. Harvest Soil and/or Root Samples and Plate on Appropriate Medium

[0466] Plants will be harvested by uprooting them after a few weeks (e.g. 2-4 weeks) of growth. Alternative to growing plants in a laboratory/greenhouse, soil and/or roots of the plant of interest can be collected directly from the fields with different soil types.

[0467] To isolate rhizosphere microbes and epiphytes, plants will be removed gently by saturating the soil with distilled water or gently loosening the soil by hand to avoid damage to the roots. If larger soil particles are present, these particles will be removed by submerging the roots in a still pool of distilled water and/or by gently shaking the roots. The root will be cut and a slurry of the soil sticking to the root will be prepared by placing the root in a plate or tube with small amount of distilled water and gently shaking the plate/tube on a shaker or centrifuging the tube at low speed. This slurry will be processed as described below.

[0468] To isolate endophytes, excess soil on root surfaces will be removed with deionized water. Following soil removal, plants will be surface sterilized and rinsed vigorously in sterile water. A cleaned, 1 cm section of root will be excised from the plant and placed in a phosphate buffered saline solution containing 3 mm steel beads. A slurry will be generated by vigorous shaking of the solution with a Qiagen TissueLyser II.

[0469] The soil and/or root slurry can be processed in various ways depending on the desired plant-beneficial trait of microbes to be isolated. For example, the soil and root slurry can be diluted and inoculated onto various types of screening media to isolate rhizospheric, endophytic, epiphytic, and other plant-associated microbes. For example, if the desired plant-beneficial trait is nitrogen fixation, then the soil/root slurry will be plated on a nitrogen free media (e.g. Nfb agar media) to isolate nitrogen fixing microbes. Similarly, to isolate phosphate solubilizing bacteria (PSB), media containing calcium phosphate as the sole source of phosphorus can be used. PSB can solubilize calcium phosphate and assimilate and release phosphorus in higher amounts. This reaction is manifested as a halo or a clear zone on the plate and can be used as an initial step for isolating PSB.

[0470] 4. Pick Colonies, Purify Cultures, and Screen for the Presence of Genes of Interest

[0471] Populations of microbes obtained in step A3 are streaked to obtain single colonies (pure cultures). A part of the pure culture is resuspended in a suitable medium (e.g. a mixture of R2A and glycerol) and subjected to PCR analysis to screen for the presence of one or more genes of interest. For example, to identify nitrogen fixing bacteria (diazotrophs), purified cultures of isolated microbes can be subjected to a PCR analysis to detect the presence of nif genes that encode enzymes involved in the fixation of atmospheric nitrogen into a form of nitrogen available to living organisms.

[0472] 5. Bank a Purified Culture

[0473] Purified cultures of isolated strains will be stored, for example at −80° C., for future reference and analysis.

### B. Characterization of Isolated Microbes

[0474] 1. Phylogenetic Characterization and Whole Genome Sequencing

[0475] Isolated microbes will be analyzed for phylogenetic characterization (assignment of genus and species) and the whole genome of the microbes will be sequenced.

[0476] For phylogenetic characterization, 16S rDNA of the isolated microbe will be sequenced using degenerate 16S rDNA primers to generate phylogenetic identity. The 16S rDNA sequence reads will be mapped to a database to initially assign the genus, species and strain name for isolated microbes. Whole genome sequencing is used as the final step to assign phylogenetic genus/species to the microbes.

[0477] The whole genome of the isolated microbes will be sequenced to identify key pathways. For the whole genome sequencing, the genomic DNA will be isolated using a genomic DNA isolation kit (e.g. QIAmp DNA mini kit from QIAGEN) and a total DNA library will be prepared using the methods known in the art. The whole genome will be sequenced using high throughput sequencing (also called Next Generation Sequencing) methods known in the art. For example, Illumina, Inc., Roche, and Pacific Biosciences provide whole genome sequencing tools that can be used to prepare total DNA libraries and perform whole genome sequencing.

[0478] The whole genome sequence for each isolated strain will be assembled; genes of interest will be identified; annotated; and noted as potential targets for remodeling. The whole genome sequences will be stored in a database.

[0479] 2. Assay the Microbe for Colonization of a Host Plant in a Greenhouse

[0480] Isolated microbes will be characterized for the colonization of host plants in a greenhouse. For this, seeds of the desired host plant (e.g., corn, wheat, rice, sorghum, and soybean) will be inoculated with cultures of isolated microbes individually or in combination and planted into soil. Alternatively, cultures of isolated microbes, individually or in combination, can be applied to the roots of the host plant by inoculating the soil directly over the roots. The colonization potential of the microbes will be assayed, for example, using a quantitative PCR (qPCR) method described in a greater detail below.

[0481] 3. Assay the Microbe for Colonization of the Host Plant in Small-Scale Field Trials and Isolate RNA from Colonized Root Samples (CAT Trials)

[0482] Isolated microbes will be assessed for colonization of the desired host plant in small-scale field trials. Additionally, RNA will be isolated from colonized root samples to obtain transcriptome data for the strain in a field environment. These small-scale field trials are referred to herein as CAT (Colonization and Transcript) trials, as these trials provide Colonization and Transcript data for the strain in a field environment.

[0483] For these trials, seeds of the host plant (e.g., corn, wheat, rice, sorghum, and soybean) will be inoculated using cultures of isolated microbes individually or in combination and planted into soil. Alternatively, cultures of isolated microbes, individually or in combination, can be applied to the roots of the host plant by inoculating the soil directly over the roots. The CAT trials can be conducted in a variety of soils and/or under various temperature and/or moisture conditions to assess the colonization potential and obtain transcriptome profile of the microbe in various soil types and environmental conditions.

[0484] Colonization of roots of the host plant by the inoculated microbe(s) will be assessed, for example, using a qPCR method as described below.

[0485] In one protocol, the colonization potential of isolated microbes was assessed as follows. One day after planting of corn seeds, 1 ml of microbial overnight culture (SOB media) was drenched right at the spot of where the seed was located. 1 mL of this overnight culture was roughly equivalent to about 10\hat{ }9 cfu, varying within 3-fold of each other, depending on which strain is being used. Each seedling was fertilized 3× weekly with 50 mL modified Hoagland's solution supplemented with either 2.5 mM or 0.25 mM ammonium nitrate. At four weeks after planting, root samples were collected for DNA extraction. Soil debris were washed away using pressurized water spray. These tissue samples were then homogenized using QIAGEN Tissuelyzer and the DNA was then extracted using QIAmp DNA Mini Kit (QIAGEN) according to the recommended protocol. qPCR assay was performed using Stratagene Mx3005P RT-PCR on these DNA extracts using primers that were designed (using NCBI's Primer BLAST) to be specific to a loci in each of the microbe's genome.

[0486] The presence of the genome copies of the microbe was quantified, which reflected the colonization potential of the microbe. Identity of the microbial species was confirmed by sequencing the PCR amplification products.

[0487] Additionally, RNA will be isolated from colonized root and/or soil samples and sequenced.

[0488] Unlike the DNA profile, an RNA profile varies depending on the environmental conditions. Therefore, sequencing of RNA isolated from colonized roots and/or soil will reflect the transcriptional activity of genes in planta in the rhizosphere.

[0489] RNA can be isolated from colonized root and/or soil samples at different time points to analyze the changes in the RNA profile of the colonized microbe at these time points.

[0490] For example, RNA can be isolated from colonized root and/or soil samples right after fertilization of the field and a few weeks after fertilization of the field and sequenced to generate corresponding transcriptional profile.

[0491] Similarly, RNA sequencing can be carried out under high phosphate and low phosphate conditions to understand which genes are transcriptionally active or repressed under these conditions.

[0492] Methods for transcriptomic/RNA sequencing are known in the art. Briefly, total RNA will be isolated from the purified culture of the isolated microbe; cDNA will be prepared using reverse transcriptase; and the cDNA will be sequenced using high throughput sequencing tools described above.

[0493] Sequencing reads from the transcriptome analysis can be mapped to the genomic sequence and transcriptional promoters for the genes of interest can be identified.

[0494] 4. Assay the Plant-Beneficial Activity of Isolated Microbes

[0495] The plant-beneficial activity of isolated microbes will be assessed.

[0496] For example, nitrogen fixing microbes will be assayed for nitrogen fixation activity using an acetylene reduction assay (ARA) or phosphate solubilizing microbes will be assayed for phosphate solubilization. Any parameter of interest can be utilized and an appropriate assay developed for such. For instance, assays could include growth curves for colonization metrics and assays for production of phytohormones like indole acetic acid (IAA) or gibberellins. An assay for any plant-beneficial activity that is of interest can be developed.

[0497] This step will confirm the phenotype of interest and eliminate any false positives.

[0498] 5. Selection of Potential Candidates from Isolated Microbes

[0499] The data generated in the above steps will be used to select microbes for further development. For example, microbes showing a desired combination of colonization potential, plant-beneficial activity, and/or relevant DNA and RNA profile will be selected for domestication and remodeling.

### C. Domestication of Selected Microbes

[0500] The selected microbes will be domesticated; wherein, the microbes will be converted to a form that is genetically tractable and identifiable.

[0501] 1. Test for Antibiotic Sensitivity

[0502] One way to domesticate the microbes is to engineer them with antibiotic resistance. For this, the wild type microbial strain will be tested for sensitivity to various antibiotics. If the strain is sensitive to the antibiotic, then the antibiotic can be a good candidate for use in genetic tools/vectors for remodeling the strain.

[0503] 2. Design and Build a Vector

[0504] Vectors that are conditional for their replication (e.g. a suicide plasmid) will be constructed to domesticate the selected microbes (host microbes). For example, a suicide plasmid containing an appropriate antibiotic resistance marker, a counter selectable marker, an origin of replication for maintenance in a donor microbe (e.g. E. coli), a gene encoding a fluorescent protein (GFP, RFP, YFP, CFP, and the like) to screen for insertion through fluorescence, an origin of transfer for conjugation into the host microbe, and a polynucleotide sequence comprising homology arms to the host genome with a desired genetic variation will be constructed. The vector may comprise a SceI site and other additional elements.

[0505] Exemplary antibiotic resistance markers include ampicillin resistance marker, kanamycin resistance marker, tetracycline resistance marker, chloramphenicol resistance marker, erythromycin resistance marker, streptomycin resistance marker, spectinomycin resistance marker, etc. Exemplary counter selectable markers include sacB, rpsL, tetAR, pheS, thyA, lacY, gata-1, ccdB, etc.

[0506] 3. Generation of Donor Microbes

[0507] In one protocol, a suicide plasmid containing an appropriate antibiotic resistance marker, a counter selectable marker, the λpir origin of replication for maintenance in E. coli ST18 containing the pir replication initiator gene, a gene encoding green fluorescent protein (GFP) to screen for insertion through fluorescence, an origin of transfer for conjugation into the host microbe, and a polynucleotide sequence comprising homology arms to the host genome with a desired genetic variation (e.g. a promoter from within the microbe's own genome for insertion into a heterologous location) will be transformed into E. coli ST18 (an auxotroph for aminolevulinic acid, ALA) to generate donor microbes.

[0508] 4. Mix Donor Microbes with Host Microbes

[0509] Donor microbes will be mixed with host microbes (selected candidate microbes from step B5) to allow conjugative integration of the plasmid into the host genome. The mixture of donor and host microbes will be plated on a medium containing the antibiotic and not containing ALA. The suicide plasmid is able to replicate in donor microbes (E. coli ST18), but not in the host. Therefore, when the mixture containing donor and host microbes is plated on a medium containing the antibiotic and not containing ALA, only host cells that integrated the plasmid into its genome will be able to grow and form colonies on the medium. The donor microbes will not grow due to the absence of ALA.

[0510] 5. Confirm Integration of the Vector

[0511] A proper integration of the suicide plasmid containing the fluorescent protein marker, the antibiotic resistance marker, the counter selectable marker, etc. at the intended locus of the host microbe will be confirmed through fluorescence of colonies on the plate and using colony PCR.

[0512] 6. Streak Confirm Integration Colony

[0513] A second round of homologous recombination in the host microbes will loop out (remove) the plasmid backbone leaving the desired genetic variation (e.g. a promoter from within the microbe's own genome for insertion into a heterologous location) integrated into the host genome of a certain percentage of host microbes, while reverting a certain percentage back to wild type.

[0514] Colonies of host microbes that have looped out the plasmid backbone (and therefore, looped out the counter selectable marker) can be selected by growing them on an appropriate medium.

[0515] For example, if sacB is used as a counter selectable marker, loss of this marker due to the loss of the plasmid backbone will be tested by growing the colonies on a medium containing sucrose (sacB confers sensitivity to sucrose). Colonies that grow on this medium would have lost the sacB marker and the plasmid backbone and would either contain the desired genetic variation or be reverted to wild type. Also, these colonies will not fluoresce on the plate due to the loss of the fluorescent protein marker.

[0516] In some isolates, the sacB or other counterselectable markers do not confer full sensitivity to sucrose or other counterselection mechanisms, which necessitates screening large numbers of colonies to isolate a successful loop-out. In those cases, loop-out may be aided by use of a “helper plasmid” that replicates independently in the host cell and expresses a restriction endonuclease, e.g. SceI, which recognizes a site in the integrated suicide plasmid backbone. The strain with the integrated suicide plasmid is transformed with the helper plasmid containing an antibiotic resistance marker, an origin of replication compatible with the host strain, and a gene encoding a restriction endonuclease controlled by a constitutive or inducible promoter. The double-strand break induced in the integrated plasmid backbone by the restriction endonuclease promotes homologous recombination to loop-out the suicide plasmid. This increases the number of looped-out colonies on the counterselection plate and decreases the number of colonies that need to be screened to find a colony containing the desired mutation. The helper plasmid is then removed from the strain by culture and serial passaging in the absence of antibiotic selection for the plasmid. The passaged cultures are streaked for single colonies, colonies are picked and screened for sensitivity to the antibiotic used for selection of the helper plasmid, as well as absence of the plasmid confirmed by colony PCR. Finally, the genome is sequenced and the absence of helper plasmid DNA is confirmed as described in D6.

[0517] 7. Confirm Integration of the Genetic Variation Through Colony PCR

[0518] The colonies that grew better on the sucrose-containing medium (or other appropriate media depending on the counter selectable marked used) will be picked and the presence of the genetic variation at the intended locus will be confirmed by screening the colonies using colony PCR.

[0519] Although this example describes one protocol for domesticating the microbe and introducing genetic variation into the microbe, one of ordinary skill in the art would understand that the genetic variation can be introduced into the selected microbes using a variety of other techniques known in the art such as: polymerase chain reaction mutagenesis, oligonucleotide-directed mutagenesis, saturation mutagenesis, fragment shuffling mutagenesis, homologous recombination, ZFN, TALENS, CRISPR systems (Cas9, Cpf1, etc.), chemical mutagenesis, and combinations thereof.

[0520] 8. Iterate Upon Steps C2-C7

[0521] If any of the steps C2-C7 fail to provide the intended outcome, the steps will be repeated to design an alternative vector that may comprise different elements for facilitating incorporation of desired genetic variations and markers into the host microbe.

[0522] 9. Develop a Standard Operating Procedure (SOP)

[0523] Once the steps C2-C7 can be reproduced consistently for a given strain, the steps will be used to develop a standard operating procedure (SOP) for that strain and vector. This SOP can be used to improve other plant-beneficial traits of the microbe.

### D. Non-Intergeneric Engineering Campaign and Optimization

[0524] 1. Identify Gene Targets for Optimization

[0525] Selected microbes will be engineered/remodeled to improve performance of the plant-beneficial activity. For this, gene targets for improving the plant-beneficial activity will be identified.

[0526] Gene targets can be identified in various ways. For example, genes of interest can be identified while annotating the genes from the whole genome sequencing of isolated microbes. They can be identified through a literature search. For example, genes involved in nitrogen fixation are known in the literature. These known genes can be used as targets for introducing genetic variations. Gene targets can also be identified based on the RNA sequencing data obtained in the step B3 (small-scale field trials for colonization) or by performing RNA sequencing described in the step below.

[0527] 2. Select Promoters for Promoter Swaps

[0528] A desired genetic variation for improving the plant-beneficial activity can comprise promoter swapping, in which the native promoter for a target gene is replaced with a stronger or weaker promoter (when compared to the native promoter) from within the microbe's genome, or differently regulated promoter (e.g. a N-independent). If the expression of a target gene increases the plant-beneficial activity (e.g., nifA, the expression of which enhances nitrogen fixation in microbes), the desired promoter for promoter swapping is a stronger promoter (compared to the native promoter of the target gene) that would further increase the expression level of the target gene compared to the native promoter. If the expression of a target gene decreases the plant-beneficial activity (e.g., nifL that downregulates nitrogen fixation), the desired promoter for promoter swapping is a weak promoter (compared to the native promoter of the target gene) that would substantially decrease the expression level of the target gene compared to the native promoter. Promoters can be inserted into genes to “knock-out” a gene's expression, while at the same time upregulating the expression of a downstream gene.

[0529] Promoters for promoter swapping can be selected based on the RNA sequencing data. For example, the RNA sequencing data can be used to identify strong and weak promoters, or constitutively active vs. inducible promoters.

[0530] For example, to identify strong and weak promoters, or constitutively active vs. inducible promoters, in the nitrogen fixation pathway, selected microbes will be cultured in vitro under nitrogen-depleted and nitrogen-replete conditions; RNA of the microbe will be isolated from these cultures; and sequenced.

[0531] In one protocol, the RNA profile of the microbe under nitrogen-depleted and nitrogen-replete conditions will be compared and active promoters with a desired transcription level will be identified. These promoters can be selected to swap a weak promoter.

[0532] Promoters can also be selected using the RNA sequencing data obtained in the step B3 that reflects the RNA profile of the microbe in planta in the host plant rhizosphere.

[0533] RNA sequencing under various conditions allows for selection of promoters that: a) are active in the rhizosphere during the host plant growth cycle in fertilized field conditions, and b) are also active in relevant in vitro conditions so they can be rapidly screened.

[0534] In an exemplary protocol, in planta RNA sequencing data from colonization assays (e.g. step B3) is used to measure the expression levels of genes in isolated microbes. In one embodiment, the level of gene expression is calculated as reads per kilobase per million mapped reads (RPKM). The expression level of various genes is compared to the expression level of a target gene and at least the top 10, 20, 30, 40, 50, 60, or 70 promoters, associated with the various genes, that show the highest or lowest level of expression compared to the target gene are selected as possible candidates for promoter swapping. Thus, one looks at expression levels of various genes relative to a target gene and then selects genes that demonstrate increased expression relative to a target (or standard) gene and then find the promoters associated with said genes.

[0535] For example, if the target gene is upregulation of nifA, the first 10, 20, 30, 40, 50, or 60 promoters for genes that show the highest level of expression compared to nifA are selected as possible candidates for promoter swapping.

[0536] These candidates can be further short-listed based on in vitro RNA sequencing data. For example, for nifA as the target gene, possible promoter candidates selected based on the in planta RNA sequencing data are further selected by choosing promoters with similar or increased gene expression levels compared to nifA under in vitro nitrogen-deplete vs. nitrogen-replete conditions.

[0537] The set of promoters selected in this step are used to swap the native promoter of the target gene (e.g. nifA). Remodeled strains with swapped promoters are tested in in vitro assays; strains with lower than expected activity are eliminated; and strains with expected or higher than expected activity are tested in field. The cycle of promoter selection may be repeated on remodeled strains to further improve their plant-beneficial activity.

[0538] Described here is an exemplary promoter swap experiment that was carried out based on in planta and in vitro RNA sequencing data from Klebsiella variicola strain, CI137 to improve the nitrogen fixation trait. CI137 was analyzed in ARA assays at 0 mM and 5 mM glutamine concentration and RNA was extracted from these ARA samples. The RNA was sequenced via NextSeq and a subset of reads from one sample was mapped to the CI137 genome (in vitro RNA sequencing data). RNA was extracted from the roots of corn plants at V5 stage in the colonization and activity assay (e.g. step B3) for CI137. Samples from 6 plants were pooled; the RNA from the pooled sample was sequenced using NextSeq, and reads were mapped to the CI137 genome (in planta RNA sequencing data). Out of 2×10⁸ total reads, 7×10⁴ reads mapped to CI137. In planta RNA sequencing data was used to rank genes in order of in planta expression levels and the expression levels were compared to the native nifA expression level. The first 40 promoters that showed the highest expression level (based on gene expression) compared to the native nifA expression level were selected. These 40 promoters were further short-listed based on the in vitro RNA sequencing data, where promoters with increased or similar in vitro expression levels compared to nifA were selected. The final list of promoters included 17 promoters and 2 versions of most promoters were used to generate promoter swap mutants; thus a total of 30 promoters were tested. Generation of a suite of CI137 mutants where nifL was deleted partially or completely and the 30 promoters inserted (ΔnifL::Prm) was attempted. 28 out of 30 mutants were generated successfully. The ΔnifL::Prm mutants were analyzed in ARA assays at 0 mM and 5 mM glutamine concentration and RNA was extracted from these ARA samples. Several mutants showed lower than expected or decreased ARA activity compared to the WT CI137 strain. A few mutants showed higher than expected ARA activity.

[0539] A person of ordinary skill in the art would appreciate from the above example that while in planta and/or in vitro RNA sequencing data can be used to select promoters for promoter swapping, the step of promoter selection is highly unpredictable and involves many challenges.

[0540] For example, in planta RNA sequencing mainly reveals the genes that are highly expressed; however, it is difficult to detect fine differences in gene expression and/or genes with low expression levels. For instance, in some in planta RNA sequencing experiments, only about 40 out of about 5000 genes from a microbial genome were detected. Thus, in planta RNA sequencing technique is useful to identify abundantly expressed genes and their corresponding promoters; however, the technique has difficulty in identifying low expression genes and corresponding promoters and small differences between gene expression.

[0541] Furthermore, in planta RNA profile reflects the status of the genes at the time the microbes were isolated; however, a slight change in the field conditions can substantially change the RNA profile of rhizosphere/epiphytic/endophytic microbes. Therefore, it is difficult to predict in advance whether the promoters selected based on one field trial RNA sequencing data would provide desirable expression levels of the target gene when remodeled strains are tested in vitro and in field.

[0542] Additionally, in planta evaluation is time and resource-consuming; therefore, in planta experiments cannot be conducted often and/or repeated quickly or easily. On the other hand, while in vitro RNA sequencing can be conducted relatively quickly and easily, the in vitro conditions do not mimic the field conditions and promoters that may show high activity in vitro may not show comparable activity in planta.

[0543] Moreover, promoters often don't behave as predicted in a new context. Therefore, in planta and in vitro RNA sequencing data can at best serve as a starting point in the step of promoter selection; however, arriving at any particular promoter that would provide desirable expression levels of the target gene in the field is, in some instances, unpredictable.

[0544] Another limitation in the step of promoter selection is the number of available promoters. Because one of the goals of the present invention is to provide non-transgenic microbes; promoters for promoter swapping need to be selected from within the microbe's genome, or genus. Thus, unlike a transgenic approach, the present process cannot merely go out into the literature and find/use a well-characterized transgenic promoter from a different host organism.

[0545] Another constraint is that the promoter must be active in planta during a desired growth phase. For example, the highest requirement for nitrogen in plants is generally late in the growing season, e.g. late vegetative and early reproductive phases. For example, in corn, nitrogen uptake is the highest during V6 (6 leaves) through R1 (reproductive stage 1) stages. Therefore, to increase the availability of nitrogen during V6 through R1 stages of corn, remodeled microbes must show highest nitrogen fixation activity during these stages of the corn lifecycle. Accordingly, promoters that are active in planta during the late vegetative and early reproductive stages of corn need to be selected. This constraint not only reduces the number of promoters that may be tested in promoter swapping, but also make the step of promoter selection unpredictable. As discussed above, unpredictability arises, in part, because although the RNA sequencing data from small scale field trials (e.g. step B3) may be used to identify promoters that are active in planta during a desired growth stage, the RNA data is based on the field conditions (e.g., type of soil, level of water in the soil, level of available nitrogen, etc.) at the time of sample collection. As one of ordinary skill in the art would understand, the field conditions may change over the period of time within the same field and also change substantially across various fields. Thus, the promoters selected under one field condition may not behave as expected under other field conditions. Similarly, selected promoters may not behave as expected after swapping. Therefore, it is difficult to anticipate in advance whether the selected promoters would be active in planta during a desired growth phase of a plant of interest.

[0546] 3. Design Non-Intergeneric Genetic Variations

[0547] Based on steps D1 (identification of gene targets) and D2 (identification of promoters for promoter swaps), non-intergeneric genetic variations will be designed.

[0548] The term “non-intergeneric” indicates that the genetic variation to be introduced into the host does not contain a nucleic acid sequence from outside the host genus (i.e., no transgenic DNA). Although vectors and/or other genetic tools will be used to introduce the genetic variation into the host microbe, the methods of the present disclosure include steps to loop-out (remove) the backbone vector sequences or other genetic tools introduced into the host microbe leaving only the desired genetic variation into the host genome. Thus, the resulting microbe is non-transgenic.

[0549] Exemplary non-intergeneric genetic variations include a mutation in the gene of interest that may improve the function of the protein encoded by the gene; a constitutionally active promoter that can replace the endogenous promoter of the gene of interest to increase the expression of the gene; a mutation that will inactivate the gene of interest; the insertion of a promoter from within the host's genome into a heterologous location, e.g. insertion of the promoter into a gene that results in inactivation of said gene and upregulation of a downstream gene; and the like. The mutations can be point mutations, insertions, and/or deletions (full or partial deletion of the gene). For example, in one protocol, to improve the nitrogen fixation activity of the host microbe, a desired genetic variation may comprise an inactivating mutation of the nifL gene (negative regulator of nitrogen fixation pathway) and/or comprise replacing the endogenous promoter of the nifH gene (nitrogenase iron protein that catalyzes a key reaction to fix atmospheric nitrogen) with a constitutionally active promoter that will drive the expression of the nifH gene constitutively.

[0550] 4. Generate Non-Intergeneric Derivative Strains

[0551] After designing the non-intergeneric genetic variations, steps C2-C7 will be carried out to generate non-intergeneric derivative strains (i.e. remodeled microbes).

[0552] 5. Bank a Purified Culture of the Remodeled Microbe

[0553] A purified culture of the remodeled microbe will be preserved in a bank, so that gDNA can be extracted for whole genome sequencing described below.

[0554] 6. Confirm Presence of the Desired Genetic Variation

[0555] The genomic DNA of the remodeled microbe will be extracted and the whole genome sequencing will be performed on the genomic DNA using methods described previously. The resulting reads will be mapped to the reads previously stored in LIMS to confirm: a) presence of the desired genetic variation, and b) complete absence of reads mapping to vector sequences (e.g. plasmid backbone or helper plasmid sequence) that were used to generate the remodeled microbe.

[0556] This step allows sensitive detection of non-host genus DNA (transgenic DNA) that may remain in the strain after looping out of the vector backbone (e.g. suicide plasmid) method and could provide a control for accidental off-target insertion of the genetic variation, etc.

### E. Analytics Upon Remodeled Microbes

[0557] 1. Analysis of the Plant-Beneficial Activity

[0558] The plant-beneficial activity and growth kinetics of the remodeled microbes will be assessed in vitro.

[0559] For example, strains remodeled for improving nitrogen fixation function will be assessed for nitrogen fixation activity and fitness through acetylene reduction assays, ammonium excretion assays, etc.

[0560] Strains remodeled for improved phosphate solubilization will be assessed for the phosphate solubilization activity.

[0561] This step allows rapid, medium to high throughput screening of remodeled strains for the phenotypes of interest.

[0562] 2. Analysis of Colonization and Transcription of the Altered Genes

[0563] Remodeled strains will be assessed for colonization of the host plant either in the greenhouse or in the field using the steps described in B3. Additionally, RNA will be isolated from colonized root and/or soil samples and sequenced to analyze the transcriptional activity of target genes. Target genes comprise the genes containing the genetic variation introduced and may also comprise other genes that play a role in the plant-beneficial trait of the microbe.

[0564] For example, a cluster of genes, the nif genes, controls the nitrogen fixation activity of microbes. Using the protocol described above, a genetic variation may be introduced into one of the nif genes (e.g. a promoter insertion), whereas the other genes in the nif cluster are in their endogenous form (i.e. their gene sequence and/or the promoter region is not altered). The RNA sequencing data will be analyzed for the transcriptional activity of the nif gene containing the genetic variation and may also be analyzed for other nif genes that are not altered directly, by the inserted genetic change, but nonetheless may be influenced by the introduced genetic change.

[0565] This step allows determination of the fitness of top in vitro performing strains in the rhizosphere and allows measurement of the transcriptional activity of altered genes in planta.

### F. Iterate Engineering Campaign/Analytics

[0566] The data from in vitro and in planta analytics (steps E1 and E2) will be used to iteratively stack beneficial mutations.

[0567] Furthermore, steps A-E described above may be repeated to fine-tune the plant-beneficial traits of the microbes. For example, plants will be inoculated using microbial strains remodeled in the first round; harvested after a few weeks of growth; and microbes from the soil and/or roots of the plants will be isolated. The functional activity (plant-beneficial trait and colonization potential) and the DNA and RNA profile of isolated microbes will be characterized, in order to select microbes with improved plant-beneficial activity and colonization potential. The selected microbes will be remodeled to further improve the plant-beneficial activity. Remodeled microbes will be screened for the functional activity (plant-beneficial trait and colonization potential) and RNA profile in vitro and in planta and the top performing strains will be selected. If desired, steps A-E can be repeated to further improve the plant-beneficial activity of the remodeled microbes from the second round. The process can be repeated for 1, 2, 3, 4, 5, 6, 7, 8, 9, 10, or more rounds.

[0568] The exemplary steps described above are summarized in Table A below.

TABLE A
An Overview of an Embodiment of the Guided Microbial Remodeling Platform

| | Steps | Contribution | Alternate Forms |
|---|---|---|---|
| A | Isolation | | |
| 1 | Obtain a soil sample | Provides WT soil microbes | |
| | | to be isolated | |
| 2 | Grow corn “bait | Allows selection of plant- | Wheat, sorghum, rice, millet, |
| | plants” in soil sample | beneficial microbes by | soybean, etc. |
| | | rhizosphere | |
| 3 | Harvest, clean and | Down-select soil microbes | Other nitrogen-free media, other |
| | extract root sample | to those that a) colonize the | selective or screening media (eg. |
| | and plate on nitrogen- | root and b) fix atmospheric | for phosphate solubilization) |
| | free (specifically | nitrogen | |
| | NfB) media | | |
| 4 | Pick colonies, purify | Down-select microbes to | Degenerate primers for other |
| | cultures and screen | those containing the nifH | genes of interest, e.g. ipdC |
| | for presence of nifH | gene (eliminate false- | (phytohormone biosynthesis) |
| | using degenerate | positive from media | |
| | primers | screen) | |
| 5 | Bank a purified | | |
| | culture of the strain | | |
| B | Characterization | | |
| 1 | Sequence and | Characterize genome for | |
| | assemble the genome | key pathways | |
| | of the strain using | | |
| | Illumina and/or | | |
| | PacBio platform | | |
| 2 | Assay the microbe for | Down-select for microbes | Wheat, sorghum, rice, millet, |
| | colonization of corn | that colonize the plant well | soybean, etc., other methods for |
| | roots in the | | assaying colonization (e.g. |
| | greenhouse (qPCR- | | plating) |
| | based method) | | |
| 3 | Assay the microbe for | Known internally as “CAT” | Larger field trials, other crops, |
| | colonization of com | trials, these provide | other methods for assaying |
| | roots in a small-scale | Colonization And | colonization (e.g. plating) |
| | field trials (qPCR- | Transcript data for the | |
| | based method) and | strain in a field | |
| | isolate RNA from | environment | |
| | colonized root | | |
| | samples | | |
| 4 | Assay the microbe for | Confirm N-fixation | |
| | nitrogen fixation | phenotype of strain | |
| | activity in an | | |
| | acetylene reduction | | |
| | assay (ARA) | | |
| 5 | Use the above data to | Allows selection of | |
| | select candidate | greatest-potential | |
| | microbe for further | candidates | |
| | domestication and | | |
| | optimization | | |
| C | Domestication | | |
| 1 | Test microbes for | Determine which antibiotic | |
| | sensitivity to various | selection markers can be | |
| | antibiotics | used to transform genetic | |
| | | tools | |
| 2 | Design and build a | These are the “parts” | Plasmid could contain a SceI site |
| | suicide plasmid | necessary to maintain the | or other counter-selectable |
| | containing an | plasmid and carry out | marker, alternate fluorescent |
| | appropriate antibiotic | conjugation, insertion and | reporters, additional elements |
| | resistance marker, | “loop-out” of the host | |
| | sacB counter- | genome | |
| | selectable marker, | | |
| | origin of replication | | |
| | for maintenance in E. | | |
| | coli, GFP to screen | | |
| | for insertion through | | |
| | fluorescence, origin | | |
| | of transfer for | | |
| | conjugation into the | | |
| | host, homology arms | | |
| | to the host genome, | | |
| | and the desired | | |
| | mutation. | | |
| 3 | Transform suicide | Preparation for conjugation | Could use a different donor strain |
| | plasmid into E. coli | into host; plasmid | of E. coli or other microbe; |
| | ST18 (an auxotroph | maintenance | different auxotrophic marker |
| | for aminolevulinic | | |
| | acid, ALA) to | | |
| | generate donor cells | | |
| 4 | Mix donor cells with | The suicide plasmid is able | Could use a different donor strain |
| | recipient host cells to | to replicate in E. coli but | of E. coli or other microbe; |
| | conjugate, and plate | not in the host Therefore | different auxotrophic marker |
| | on media selecting for | plating of the mixture on | |
| | the antibiotic | such plates means that only | |
| | resistance marker and | host cells that received the | |
| | NOT containing ALA | plasmid and experience | |
| | | plasmid integration into the | |
| | | chromosome will be able to | |
| | | grow and form colonies. | |
| | | The E coli ST18 is unable | |
| | | to grow due to the absence | |
| | | of ALA | |
| 5 | Confirm integration | Confirms proper integration | |
| | of the plasmid | of the suicide plasmid | |
| | through GFP | backbone containing GFP, | |
| | fluorescence, and | the antibiotic resistance | |
| | integration at the | cassette, the sacB marker, | |
| | intended locus | etc. | |
| | through colony PCR | | |
| 6 | Streak confirmed | The sacB marker confers | Different counter selectable |
| | integration colony on | sensitivity to sucrose; | marker, SceI-mediated loop-out, |
| | a plate containing | colonies which have | etc. |
| | sucrose and screen for | undergone a second round | |
| | non-fluorescent | of homologous | |
| | colonies | recombination and “looped- | |
| | | out” the plasmid will grow | |
| | | better and not fluoresce on | |
| | | the plate. | |
| 7 | Screen looped-out | Upon the second | |
| | colonies for the | homologous recombination | |
| | intended mutation | event only 50% of looped | |
| | using colony PCR | out colonies should contain | |
| | | the mutation, the other 50% | |
| | | will be WT | |
| 8 | If any of the steps 2-7 | Allows iterative | |
| | fail, go back to step 2 | troubleshooting of suicide | |
| | and re-design with | plasmid to develop a | |
| | alternate plasmid | working protocol | |
| | parts | | |
| 9 | Once steps 2-7 can be | | |
| | reliably performed, | | |
| | develop an SOP for | | |
| | that strain/plasmid to | | |
| | be used for | | |
| | Optimization | | |
| D | Non-Intergeneric | | |
| | Engineering | | |
| | Campaign and | | |
| | Optimization | | |
| 1 | Identify gene targets | | |
| | for optimizing a | | |
| | pathway, eg. nif | | |
| | genes through | | |
| | literature search | | |
| 2 | Select promoters for | Allows for selection of | Alternate crops; alternate RNAseq |
| | promoter swaps using | promoters that a) are active | data conditions (greenhouse, field, |
| | RNAseq data | in the rhizosphere during | in vitro, whatever's relevant for |
| | collected both in vitro | the corn growth cycle in | the phenotype targeted) |
| | in N-depleted and N- | fertilized field conditions b) | |
| | replete conditions, | are also active in in vitro N- | |
| | and in planta from | replete conditions so they | |
| | the corn rhizosphere | can be rapidly screened. | |
| | (Collected in step B3) | | |
| 3 | Design non- | No DNA from outside the | Alter regulatory sequences (e.g. |
| | intergeneric | host chromosome is added, | RBS), non-coding RNAs, etc. |
| | mutations in key | therefore the resulting | |
| | genes: deletions (full | microbe is non-transgenic | |
| | or partial gene), | | |
| | promoter swaps, or | | |
| | single base pair | | |
| | changes; store these | | |
| | designs in our LIMS | | |
| 4 | Using the established | We perform this in higher | |
| | protocol, carry out | throughput than the | |
| | steps C2-7 to generate | domestication step - up to | |
| | non-intergeneric | 20 or so strains at once per | |
| | derivative strains | person. | |
| | (mutants) | | |
| 5 | Bank a purified | | |
| | culture of the strain, | | |
| | extract gDNA and | | |
| | conduct WGS via | | |
| | Illumina | | |
| 6 | Map the resulting | Allows very sensitive | Suicide plasmid removal is fairly |
| | reads to the designs | detection of non- | reliable; however use of other |
| | stored in LIMS to | intergeneric DNA that may | stable plasmids in alternate |
| | confirm a) presence | remain in the strain after | methods necessitates this extra |
| | of the desire mutation | the suicide plasmid method; | step to ensure with complete |
| | and b) complete | confirm absence of | confidence that no transgenic |
| | absence of reads | transgenic DNA, controls | DNA that was previously |
| | mapping to any | for accidental off-target | transformed in remains in the |
| | suicide plasmid or | insertion of the suicide | strain. |
| | other plasmid | plasmid, etc. | |
| | sequences used to | | |
| | generate the strains | | |
| E | Analytics | | |
| 1 | Analyze the strains | Allow rapid, med- to high- | Any other in vitro assay, e.g. |
| | for in vitro nitrogen | throughput screening of | phosphate solubilization, qPCR |
| | fixation activity and | mutants for phenotypes of | for transcription of specific genes, |
| | fitness through ARA, | interest | etc. |
| | ammonium excretion | | |
| | assays, and growth | | |
| | curves | | |
| 2 | Analyze the strains | Measure fitness of top in | |
| | for colonization | vitro performing strains in | |
| | (qPCR) and | the rhizosphere; measure | |
| | transcription of target | transcription of promoter- | |
| | and promoter- | swapped genes in planta | |
| | swapped genes | | |
| | (Nanostring) in the | | |
| | plant (greenhouse or | | |
| | field) | | |
| F | Iterate Engineering | | |
| | Campaign/Analytics | | |
| 1 | Use data from in vitro | | |
| | and in planta | | |
| | analytics to iteratively | | |
| | stack beneficial | | |
| | mutations. | | |

[0569] Traditional Approaches to Creating Biologicals for Agriculture Suffer from Drawbacks Inherent in their Methodology

[0570] Unlike pure bioprospecting of wild type (WT) microbes or transgenic approaches, GMR allows for non-intergeneric genetic optimization of key regulatory networks within the microbe, which improves plant-beneficial phenotypes over WT microbes, but doesn't have the risks associated with transgenic approaches (e.g. unpredictable gene function, public and regulatory concerns). See, FIG. 1C for a depiction of a problematic “traditional bioprospecting” approach, which has several drawbacks compared to the taught GMR platform.

[0571] Other methods for developing microbials for agriculture are focused on either extensive lab development, which often fails at the field scale, or extensive greenhouse or “field-first” testing without an understanding of the underlying mechanisms/plant-microbe interactions. See, FIG. 1D for a depiction of a problematic “field-first approach to bioprospecting” system, which has several drawbacks compared to the taught GMR platform.

[0572] The GMR Platform Solves these Problems in Numerous Ways

[0573] One strength of the GMR platform is the identification of active promoters, which are active at key physiologically important times for a target crop, and which are also active under particular, agriculturally relevant, environmental conditions.

[0574] As has been explained, within the context of nitrogen fixation, the GMR platform is able to identify microbial promoter sequences, which are active under environmental conditions of elevated exogenous nitrogen, which thereby allows the remodeled microbe to fix atmospheric nitrogen and deliver it to a target crop plant, under modern agricultural row crop conditions, and at a time when a plant needs the fixed nitrogen the most. See, FIG. 1E for a depiction of the time period in the corn growth cycle, at which nitrogen is needed most by the plant. The taught GMR platform is able to create remodeled microbes that supply nitrogen to a corn plant at the time period in which the nitrogen is needed, and also deliver such nitrogen even in the presence of exogenous nitrogen in the soil environment.

[0575] These promoters can be identified by rhizosphere RNA sequencing and read mapping to the microbe's genome sequence, and key pathways can be “reprogrammed” to be turned on or off during key stages of the plant growth cycle. Additionally, through whole genome sequencing of optimized microbes and mapping to previously-transformed sequences, the method has the ability to ensure that no transgenic sequences are accidentally released into the field through off-target insertion of plasmid DNA, low-level retention of plasmids not detected through PCR or antibiotic resistance, etc.

[0576] The GMR platform combines these approaches by evaluating microbes iteratively in the lab and plant environment, leading to microbes that are robust in greenhouse and field conditions rather than just in lab conditions.

[0577] Various aspects and embodiments of the taught GMR platform can be found in FIGS. 1F-1I. The GMR platform culminates in the derivation/creation/production of remodeled microbes that possess a plant-beneficial property, e.g. nitrogen fixation.

[0578] The traditional bioprospecting methods are not able to produce microbes having the aforementioned properties.

[0579] Properties of a Microbe Remodeled for Nitrogen Fixation

[0580] In the context of remodeling microbes for nitrogen fixation, there are several properties that the remodeled microbe may possess. For instance, FIG. 1J depicts 5 properties that can be possessed by remodeled microbes of the present disclosure.

[0581] Furthermore, as can be seen in Example 2, the present inventors have utilized the GMR platform to produce remodeled non-intergeneric bacteria (i.e. Kosakonia sacchari) capable of fixing atmospheric nitrogen and delivering said nitrogen to a corn plant, even under conditions in which exogenous nitrogen is present in the environment. See, FIG. 1K-M, which illustrate that the remodeling process successfully: (1) decoupled nifA expression from endogenous nitrogen regulation; and (2) improved the assimilation and excretion of fixed nitrogen.

[0582] These remodeled microbes ultimately result in corn yield improvement, when applied to corn crops. See, FIG. 1N.

[0583] The GMR Platform Provides an Approach to Nitrogen Fixation and Delivery that Solves Pressing Environmental Concerns

[0584] As explained previously, the nitrogen fertilizer produced by the industrial Haber-Bosch process is not well utilized by the target crop. Rain, runoff, heat, volatilization, and the soil microbiome degrade the applied chemical fertilizer. This equates to not only wasted money, but also adds to increased pollution instead of harvested yield. To this end, the United Nations has calculated that nearly 80% of fertilizer is lost before a crop can utilize it. Consequently, modern agricultural fertilizer production and delivery is not only deleterious to the environment, but it is extremely inefficient. See, FIG. 1O, illustrating the inefficiency of current nitrogen delivery systems, which result in underfertilized fields, over fertilized fields, and environmentally deleterious nitrogen runoff.

[0585] The current GMR platform, and resulting remodeled microbes, provide a better approach to nitrogen fixation and delivery to plants. As will be seen in the below Examples, the non-intergeneric remodeled microbes of the disclosure are able to colonize the roots of a corn plant and spoon feed said corn plants with fixed atmospheric nitrogen, even in the presence of exogenous nitrogen. This system of nitrogen fixation and delivery—enabled by the taught GMR platform—will help transform modern agricultural to a more environmentally sustainable system.

### Example 2: Guided Microbial Remodeling—an Example Embodiment for the Rational Improvement of Nitrogen Fixation

[0586] A diversity of nitrogen fixing bacteria can be found in nature, including in agricultural soils. However, the potential of a microbe to provide sufficient nitrogen to crops to allow decreased fertilizer use may be limited by repression of nitrogenase genes in fertilized soils as well as low abundance in close association with crop roots. Identification, isolation and breeding of microbes that closely associate with key commercial crops might disrupt and improve the regulatory networks linking nitrogen sensing and nitrogen fixation and unlock significant nitrogen contributions by crop-associated microbes. To this end, nitrogen fixing microbes that associate with and colonize the root system of corn were identified. This step corresponds to the “Measure the Microbiome Composition” depicted in FIG. 1A and FIG. 1B.

[0587] Root samples from corn plants grown in agronomically relevant soils were collected, and microbial populations extracted from the rhizosphere and endosphere. Genomic DNA from these samples was extracted, followed by 16S amplicon sequencing to profile the community composition.

[0588] A Kosakonia sacchari microbe (strain PBC6.1) was isolated and classified through 16S rRNA and whole genome sequencing. This is a particularly interesting nitrogen fixer capable of colonizing to nearly 21% abundance of the root-associated microbiota (FIG. 2). To assess strain sensitivity to exogenous nitrogen, nitrogen fixation rates in pure culture were measured with the classical acetylene reduction assay (ARA) and varying levels of glutamine supplementation. The species exhibited a high level of nitrogen fixing activity in nitrogen-free media, yet exogenous fixed nitrogen repressed nif gene expression and nitrogenase activity (Strain PBC6.1, FIG. 3C, FIG. 3D). Additionally, when released ammonia was measured in the supernatant of PBC6.1 grown in nitrogen-fixing conditions, very little release of fixed nitrogen could be detected (FIG. 3E).

[0589] We hypothesized that PBC6.1 could be a significant contributor of fixed nitrogen in fertilized fields if regulatory networks controlling nitrogen metabolism were remodeled to allow optimal nitrogenase expression and ammonia release in the presence of fixed nitrogen.

[0590] Sufficient genetic diversity should exist within the PBC6.1 genome to enable broad phenotypic remodeling (as a result of remodeling the underlying genetic architecture in a non-intergeneric manner) without the insertion of transgenes or synthetic regulatory elements. The isolated strain has a genome of at least 5.4 Mbp and a canonical nitrogen fixation gene cluster. Related nitrogen metabolism pathways in PBC6.1 are similar to those of the model organism for nitrogen fixation, Klebsiella oxytoca m5al.

[0591] Several gene regulatory network nodes were identified which may augment nitrogen fixation and subsequent transfer to a host plant, particularly in high exogenous concentrations of fixed nitrogen (FIG. 3A). The nifLA operon directly regulates the rest of the nif cluster through transcriptional activation by NifA and nitrogen- and oxygen-dependent repression of NifA by NifL. Disruption of nifL can abolish inhibition of NifA and improve nif expression in the presence of both oxygen and exogenous fixed nitrogen. Furthermore, expressing nifA under the control of a nitrogen-independent promoter may decouple nitrogenase biosynthesis from regulation by the NtrB/NtrC nitrogen sensing complex.

[0592] The assimilation of fixed nitrogen by the microbe to glutamine by glutamine synthetase (GS) is reversibly regulated by the two-domain adenylyltransferase (ATase) enzyme GlnE through the adenylylation and deadenylation of GS to attenuate and restore activity, respectively. Truncation of the GlnE protein to delete its adenylyl-removing (AR) domain may lead to constitutively adenylated glutamine synthetase, limiting ammonia assimilation by the microbe and increasing intra- and extracellular ammonia.

[0593] Finally, reducing expression of AmtB, the transporter responsible for uptake of ammonia, could lead to greater extracellular ammonia.

[0594] To generate rationally designed microbial phenotypes without the use of transgenes, two approaches were employed to remodel the underlying genetic architecture of the microbe: (1) creating markerless deletions of genomic sequences encoding protein domains or whole genes, and (2) rewiring regulatory networks by intragenomic promoter rearrangement.

[0595] Through an iterative remodeling process, several non-transgenic derivative strains of PBC6.1 were generated (Table 25).

TABLE 25
List of isolated and derivative K. sacchari strains used
in this work. Prm, promoter sequence derived from the PBC6.1 genome;
ΔglnE_{AR}1 and ΔglnE_{AR}2, different truncated versions of glnE
gene removing the adenylyl-removing domain sequence.

| Strain ID | Genotype |
|---|---|
| PBC6.1 | WT |
| PBC6.14 | ΔnifL::Prm1 |
| PBC6.15 | ΔnifL::Prm5 |
| PBC6.22 | ΔnifL::Prm3 |
| PBC6.37 | ΔnifL::Prm1 ΔglnE_{AR}2 |
| PBC6.38 | ΔnifL::Prm1 ΔglnE_{AR}1 |
| PBC6.93 | ΔnifL::Prm1 ΔglnE_{AR}2 ΔamtB |
| PBC6.94 | ΔnifL::Prm1 ΔglnE_{AR}1 ΔamtB |

[0596] Several in vitro assays were performed to characterize specific phenotypes of the derivative strains. The ARA was used to assess strain sensitivity to exogenous nitrogen, in which PBC6.1 exhibited repression of nitrogenase activity at high glutamine concentrations (FIG. 3D). In contrast, most derivative strains showed a derepressed phenotype with varying levels of acetylene reduction observed at high glutamine concentrations. Transcriptional rates of nifA in samples analyzed by qPCR correlated well with acetylene reduction rates (FIG. 4), supporting the hypothesis that nifL disruption and insertion of a nitrogen-independent promoter to drive nifA can lead to nif cluster derepression.

[0597] Strains with altered GlnE or AmtB activity showed markedly increased ammonium excretion rates compared to wild type or derivative strains without these mutations (FIG. 3E), illustrating the effect of these genotypes on ammonia assimilation and reuptake.

[0598] Two experiments were performed to study the interaction of PBC6.1 derivatives (remodeled microbes) with corn plants and quantify incorporation of fixed nitrogen into plant tissues. First, rates of microbial nitrogen fixation were quantified in a greenhouse study using isotopic tracers. Briefly, plants are grown with 15N labeled fertilizer, and diluted concentrations of 15N in plant tissues indicate contributions of fixed nitrogen from microbes. Corn seedlings were inoculated with selected microbial strains, and plants were grown to the V6 growth stage. Plants were subsequently deconstructed to enable measurement of microbial colonization and gene expression as well as measurement of 15N/14N ratios in plant tissues by isotope ratio mass spectrometry (IRMS). Analysis of the aerial tissue showed a small, nonsignificant contribution by PBC6.38 to plant nitrogen levels, and a significant contribution by PBC6.94 (p=0.011). Approximately 20% of the nitrogen found in above-ground corn leaves was produced by PBC6.94, with the remainder coming from the seed, potting mix, or “background” fixation by other soilborne microbes (FIG. 5C). This illustrates that our microbial breeding and remodeling pipeline can generate remodeled strains capable of making significant nitrogen contributions to plants in the presence of nitrogen fertilizer. Microbial transcription within plant tissues was measured, and expression of the nif gene cluster was observed in derivative remodeled strains, but not the wild type strain (FIG. 5B), showing the importance of nif derepression for contribution of BNF to crops in fertilized conditions. Root colonization measured by qPCR demonstrated that colonization density is different for each of the strains tested (FIG. 5A). A 50-fold difference in colonization was observed between PBC6.38 and PBC6.94. This difference could be an indication that PBC6.94 has reduced fitness in the rhizosphere relative to PBC6.38 as a result of high levels of fixation and excretion.

### Methods

### Media

[0599] Minimal medium contains (per liter) 25 g Na2HPO₄, 0.1 g CaCL₂-2H₂O, 3 g KH₂PO₄, 0.25 g MgSO₄.7H₂O, 1 g NaCl, 2.9 mg FeCl₃, 0.25 mg Na₂MoO₄.2H₂O, and 20 g sucrose. Growth medium is defined as minimal medium supplemented with 50 ml of 200 mM glutamine per liter.

### Isolation of Diazotrophs

[0600] Corn seedlings were grown from seed (DKC 66-40, DeKalb, Ill.) for two weeks in a greenhouse environment controlled from 22° C. (night) to 26° C. (day) and exposed to 16 hour light cycles in soil collected from San Joaquin County, CA. Roots were harvested and washed with sterile deionized water to remove bulk soil. Root tissues were homogenized with 2 mm stainless steel beads in a tissue lyser (TissueLyser II, Qiagen P/N 85300) for three minutes at setting 30, and the samples were centrifuged for 1 minute at 13,000 rpm to separate tissue from root-associated bacteria. Supernatants were split into two fractions, and one was used to characterize the microbiome through 16S rRNA amplicon sequencing and the remaining fraction was diluted and plated on Nitrogen-free Broth (NfB) media supplemented with 1.5% agar. Plates were incubated at 30° C. for 5-7 days. Colonies that emerged were tested for the presence of the nifH gene by colony PCR with primers Ueda19f and Ueda406r. Genomic DNA from strains with a positive nifH colony PCR was isolated (QIAamp DNA Mini Kit, Cat No. 51306, QIAGEN, Germany) and sequenced (Illumina MiSeq v3, SeqMatic, Fremont, Calif.). Following sequence assembly and annotation, the isolates containing nitrogen fixation gene clusters were utilized in downstream research.

### Microbiome Profiling of Isolation Seedlings

[0601] Genomic DNA was isolated from root-associated bacteria using the ZR-96 Genomic DNA I Kit (Zymo Research P/N D3011), and 16S rRNA amplicons were generated using nextera-barcoded primers targeting 799f and 1114r. The amplicon libraries were purified and sequenced with the Illumina MiSeq v3 platform (SeqMatic, Fremont, Calif.). Reads were taxonomically classified using Kraken using the minikraken database (FIG. 2).

### Acetylene Reduction Assay (ARA)

[0602] A modified version of the Acetylene Reduction Assay was used to measure nitrogenase activity in pure culture conditions. Strains were propagated from single colony in SOB (RPI, P/N S25040-1000) at 30° C. with shaking at 200 RPM for 24 hours and then subcultured 1:25 into growth medium and grown aerobically for 24 hours (30° C., 200 RPM). 1 ml of the minimal media culture was then added to 4 ml of minimal media supplemented with 0 to 10 mM glutamine in air-tight Hungate tubes and grown anaerobically for 4 hours (30° C., 200 RPM). 10% headspace was removed then replaced by an equal volume of acetylene by injection, and incubation continued for 1 hr. Subsequently, 2 ml of headspace was removed via gas tight syringe for quantification of ethylene production using an Agilent 6850 gas chromatograph equipped with a flame ionization detector (FID).

### Ammonium Excretion Assay

[0603] Excretion of fixed nitrogen in the form of ammonia was measured using batch fermentation in anaerobic bioreactors. Strains were propagated from single colony in 1 ml/well of SOB in a 96 well DeepWell plate. The plate was incubated at 30° C. with shaking at 200 RPM for 24 hours and then diluted 1:25 into a fresh plate containing 1 ml/well of growth medium. Cells were incubated for 24 hours (30° C., 200 RPM) and then diluted 1:10 into a fresh plate containing minimal medium. The plate was transferred to an anaerobic chamber with a gas mixture of >98.5% nitrogen, 1.2-1.5% hydrogen and <30 ppM oxygen and incubated at 1350 RPM, room temperature for 66-70 hrs. Initial culture biomass was compared to ending biomass by measuring optical density at 590 nm. Cells were then separated by centrifugation, and supernatant from the reactor broth was assayed for free ammonia using the Megazyme Ammonia Assay kit (P/N K-AMIAR) normalized to biomass at each timepoint.

### Extraction of Root-Associated Microbiome

[0604] Roots were shaken gently to remove loose particles, and root systems were separated and soaked in a RNA stabilization solution (Thermo Fisher P/N AM7021) for 30 minutes. The roots were then briefly rinsed with sterile deionized water. Samples were homogenized using bead beating with ½-inch stainless steel ball bearings in a tissue lyser (TissueLyser II, Qiagen P/N 85300) in 2 ml of lysis buffer (Qiagen P/N 79216). Genomic DNA extraction was performed with ZR-96 Quick-gDNA kit (Zymo Research P/N D3010), and RNA extraction using the RNeasy kit (Qiagen P/N 74104).

### Root Colonization Assay

[0605] Four days after planting, 1 ml of a bacterial overnight culture (approximately 10⁹ cfu) was applied to the soil above the planted seed. Seedlings were fertilized three times weekly with 25 ml modified Hoagland's solution supplemented with 0.5 mM ammonium nitrate. Four weeks after planting, root samples were collected and the total genomic DNA (gDNA) was extracted. Root colonization was quantified using qPCR with primers designed to amplify unique regions of either the wild type or derivative strain genome. QPCR reaction efficiency was measured using a standard curve generated from a known quantity of gDNA from the target genome. Data was normalized to genome copies per g fresh weight using the tissue weight and extraction volume. For each experiment, the colonization numbers were compared to untreated control seedlings.

### In Planta Transcriptomics

[0606] Transcriptional profiling of root-associated microbes was measured in seedlings grown and processed as described in the Root Colonization Assay. Purified RNA was sequenced using the Illumina NextSeq platform (SeqMatic, Fremont, Calif.). Reads were mapped to the genome of the inoculated strain using bowtie2 using ‘—very-sensitive-local’ parameters and a minimum alignment score of 30. Coverage across the genome was calculated using samtools. Differential coverage was normalized to housekeeping gene expression and visualized across the genome using Circos and across the nif gene cluster using DNAplotlib. Additionally, the in planta transcriptional profile was quantified via targeted Nanostring analysis. Purified RNA was processed on an nCounter Sprint (Core Diagnostics, Hayward, Calif.).

### 15N Dilution Greenhouse Study

[0607] A 15N fertilizer dilution experiment was performed to assess optimized strain activity in planta. A planting medium containing minimal background N was prepared using a mixture of vermiculite and washed sand (5 rinses in DI H₂O). The sand mixture was autoclaved for 1 hour at 122° C. and approximately 600 g measured out into 40 cubic inch (656 mL) pots, which were saturated with sterile DI H₂O and allowed to drain 24 hours before planting. Corn seeds (DKC 66-40) were surface sterilized in 0.625% sodium hypochlorite for 10 minutes, then rinsed five times in sterile distilled water and planted 1 cm deep. The plants were maintained under fluorescent lamps for four weeks with 16-hour day length at room temperatures averaging 22° C. (night) to 26° C. (day).

[0608] Five days after planting, seedlings were inoculated with a 1 ml suspension of cells drenched directly over the emerging coleoptile. Inoculum was prepared from 5 ml overnight cultures in SOB, which were spun down and resuspended twice in 5 ml PBS to remove residual SOB before final dilution to OD of 1.0 (approximately 10⁹ CFU/ml). Control plants were treated with sterile PBS, and each treatment was applied to ten replicate plants.

[0609] Plants were fertilized with 25 ml fertilizer solution containing 2% 15N-enriched 2 mM KNO₃ on 5, 9, 14, and 19 days after planting, and the same solution without KNO₃ on 7, 12, 16, and 18 days after planting. The fertilizer solution contained (per liter) 3 mmol CaCl₂, 0.5 mmol KH₂PO₄, 2 mmol MgSO₄, 17.9 μmol FeSO₄, 2.86 mg H₃BO₃, 1.81 mg MnCl₂.4H₂O, 0.22 mg ZnSO₄.7H₂O, 51 μg CuSO₄.5H₂O, 0.12 mg Na₂MoO₄.2H₂O, and 0.14 nmol NiCl₂. All pots were watered with sterile DI H₂O as needed to maintain consistent soil moisture without runoff.

[0610] At four weeks, plants were harvested and separated at the lowest node into samples for root gDNA and RNA extraction and aerial tissue for IRMS. Aerial tissues were wiped as needed to remove sand, placed whole into paper bags and dried for at least 72 hours at 60° C. Once completely dry, total aerial tissue was homogenized by bead beating and 5-7 mg samples were analyzed by isotope ratio mass spectrometry (IRMS) for δ15N by the MBL Stable Isotope Laboratory (The Ecosystems Center, Woods Hole, Mass.). Percent NDFA was calculated using the following formula: % NDFA=(δ15N of UTC average−δ15N of sample)/(δ15N of UTC average)×100.

### Example 3: Field Trials with Remodeled Microbes of the Disclosure—Summer 2016

[0611] In order to evaluate the efficacy of remodeled strains of the present disclosure on corn growth and productivity under varying nitrogen regimes, field trials were conducted.

[0612] Trials were conducted with (1) seven subplot treatments of six strains plus the control—four main plots comprised 0, 15, 85, and 100% of maximum return to nitrogen (MRTN) with local verification. The control (UTC only) was conducted with 10 100% MRTN plus, 5, 10, or 15 pounds. Treatments had four replications.

[0613] Plots of corn (minimum) were 4 rows of 30 feet in length, with 124 plots per location. All observations were taken from the center two rows of the plots, and all destructive sampling was taken from the outside rows. Seed samples were refrigerated until 1.5 to 2 hours prior to use.

[0614] Local Agricultural Practice: The seed was a commercial corn without conventional fungicide and insecticide treatment. All seed treatments were applied by a single seed treatment specialist to assure uniformity. Planting date, seeding rate, weed/insect management, etc. were left to local agricultural practices. With the exception of fungicide applications, standard management practices were followed.

[0615] Soil Characterization: Soil texture and soil fertility were evaluated. Soil samples were pre-planted for each replicate to insure residual nitrate levels lower than 50 lbs/Ac. Soil cores were taken from 0 cm to 30 cm. The soil was further characterized for pH, CEC, total K and P.

[0616] Assessments: The initial plant population was assessed 14 days after planting (DAP)/acre, and were further assessed for: (1) vigor (1 to 10 scale, w/10=excellent) 14 DAP & V10; (2) recordation of disease ratings any time symptoms are evident in the plots; (3) record any differences in lodging if lodging occurs in the plots; (4) yield (Bu/acre), adjusted to standard moisture pct; (5) test weight; and (6) grain moisture percentage.

[0617] Sampling Requirements: The soil was sampled at three timepoints (prior to trial initiation, V10-VT, 1 week post-harvest). All six locations and all plots were sampled at 10 grams per sample (124 plots×3 timepoints×6 locations).

[0618] Colonization Sampling: Colonization samples were collected at two timepoints (V10 and VT) for five locations and six timepoints (V4, V8, V10, VT, R5, and Post-Harvest). Samples were collected as follows: (1) from 0% and 100% MRTN, 60 plots per location; (2) 4 plants per plot randomly selected from the outside rows; (3) 5 grams of root, 8 inches of stalk, and top three leaves—bagged and IDed each separately—12/bags per plot; (4) five locations (60 plots×2 timepoints×12 bags/plot); and one location (60 plots×6 timepoints×12 bags/plot.

[0619] Normalized difference vegetation index (NDVI) determination was made using a Greenseeker instrument at two timepoints (V4-V6 and VT). Assessed each plot at all six locations (124 plots×2 timepoints×6 locations).

[0620] Root analysis was performed with Win Rhizo from one location that best illustrated treatment differentiation. Ten plants per plot were randomly sampled (5 adjacent from each outside row; V3-V4 stage plants were preferred) and gently washed to remove as much dirt as reasonable. Ten roots were placed in a plastic bag and labelled. Analyzed with WinRhizo Root Analysis.

[0621] Stalk Characteristics were measured at all six locations between R2 and R5. The stalk diameter of ten plants per plot at the 6″ height were recorded, as was the length of the first internode above the 6″ mark. Ten plants were monitored; five consecutive plants from the center of the two inside rows. Six locations were evaluated (124 plots×2 measures×6 locations).

[0622] The tissue nitrates were analyzed from all plots and all locations. An 8″ segment of stalk beginning 6″ above the soil when the corn is between one and three weeks after black layer formation; leaf sheaths were removed. All locations and plots were evaluated (6 locations×124 plots).

[0623] The following weather data was recorded for all locations from planting to harvest: daily maximum and minimum temperatures, soil temperature at seeding, daily rainfall plus irrigation (if applied), and any unusual weather events such as excessive rain, wind, cold, or heat.

[0624] Yield data across all six locations is presented in Table 26. Nitrogen rate had a significant impact on yield, but strains across nitrogen rates did not. However, at the lowest nitrogen rate, strains C1006, CM029, and C1019 numerically out-yielded the UTC by 4 to 6 bu/acre. Yield was also numerically increased 2 to 4 bu/acre by strains CM029, C1019, and CM081 at 15% MRTN.

TABLE 26
Yield data across all six locations

| | | | | | Stalk | Internode | | |
|---|---|---|---|---|---|---|---|---|
| | | YLD (bu) | Vigor_E | Vigor_L | Diameter (mm) | Length (in) | NDVI_Veg | NDVI_Rep |
| MRTN % | | | | | | | | |
| 0 | | 143.9 | 7.0 | 5.7 | 18.87 | 7.18 | 64.0 | 70.6 |
| 15 | | 165.9 | 7.2 | 6.3 | 19.27 | 7.28 | 65.8 | 72.5 |
| 85 | | 196.6 | 7.1 | 7.1 | 20.00 | 7.31 | 67.1 | 74.3 |
| 100 | | 197.3 | 7.2 | 7.2 | 20.23 | 7.37 | 66.3 | 72.4 |
| Strain | | | | | | | | |
| CI006 (1) | | 176.6 | 7.2 | 6.6 | 19.56 | 18.78 | 66.1 | 72.3 |
| CM029 (2) | | 176.5 | 7.1 | 6.5 | 19.54 | 18.61 | 65.4 | 71.9 |
| CM038 (3) | | 175.5 | 7.2 | 6.5 | 19.58 | 18.69 | 65.7 | 72.8 |
| CI019 (4) | | 176.0 | 7.1 | 6.6 | 19.51 | 18.69 | 65.5 | 72.9 |
| CM081 (5) | | 176.2 | 7.1 | 6.6 | 19.57 | 18.69 | 65.8 | 73.1 |
| CM029/CM081 (6) | | 174.3 | 7.1 | 6.6 | 19.83 | 18.79 | 66.2 | 72.5 |
| UTC (7) | | 176.4 | 7.1 | 6.6 | 19.54 | 18.71 | 65.9 | 71.7 |
| MRTN/Strain | | | | | | | | |
| 0 | 1 | 145.6 | 7.0 | 5.6 | 19.07 | 7.12 | 63.5 | 70.3 |
| 0 | 2 | 147.0 | 7.0 | 5.5 | 18.74 | 7.16 | 64.4 | 70.4 |
| 0 | 3 | 143.9 | 7.0 | 5.5 | 18.83 | 7.37 | 64.6 | 70.5 |
| 0 | 4 | 146.0 | 6.9 | 5.7 | 18.86 | 7.15 | 63.4 | 70.7 |
| 0 | 5 | 141.7 | 7.0 | 5.8 | 18.82 | 7.05 | 63.6 | 70.9 |
| 0 | 6 | 142.2 | 7.2 | 5.8 | 19.12 | 7.09 | 64.7 | 69.9 |
| 0 | 7 | 141.2 | 7.0 | 5.8 | 18.64 | 7.32 | 64.0 | 71.4 |
| 15 | 1 | 164.2 | 7.3 | 6.1 | 19.09 | 7.21 | 66.1 | 71.5 |
| 15 | 2 | 167.3 | 7.2 | 6.3 | 19.32 | 7.29 | 65.5 | 72.7 |
| 15 | 3 | 165.6 | 7.3 | 6.3 | 19.36 | 7.23 | 64.8 | 72.5 |
| 15 | 4 | 167.9 | 7.3 | 6.4 | 19.31 | 7.51 | 66.1 | 72.3 |
| 15 | 5 | 169.3 | 7.2 | 6.2 | 19.05 | 7.32 | 66.0 | 72.8 |
| 15 | 6 | 161.9 | 7.1 | 6.3 | 19.45 | 7.20 | 66.2 | 72.2 |
| 15 | 7 | 165.1 | 7.3 | 6.4 | 19.30 | 7.18 | 66.0 | 73.3 |
| 85 | 1 | 199.4 | 7.3 | 7.2 | 19.70 | 7.32 | 67.2 | 74.0 |
| 85 | 2 | 195.1 | 7.1 | 7.2 | 19.99 | 7.09 | 66.5 | 74.4 |
| 85 | 3 | 195.0 | 7.0 | 7.0 | 20.05 | 7.26 | 67.3 | 74.6 |
| 85 | 4 | 195.6 | 7.2 | 7.1 | 20.04 | 7.29 | 66.4 | 74.4 |
| 85 | 5 | 196.4 | 7.2 | 7.0 | 19.87 | 7.39 | 67.3 | 74.5 |
| 85 | 6 | 195.1 | 7.0 | 6.9 | 20.35 | 7.34 | 67.4 | 74.4 |
| 85 | 7 | 199.5 | 6.9 | 7.2 | 19.97 | 7.48 | 67.4 | 74.1 |
| 100 | 1 | 197.1 | 7.2 | 7.3 | 20.38 | 7.68 | 67.5 | 73.4 |
| 100 | 2 | 196.5 | 7.0 | 7.1 | 20.11 | 7.21 | 65.3 | 70.2 |
| 100 | 3 | 197.6 | 7.5 | 7.3 | 20.08 | 7.42 | 66.3 | 73.4 |
| 100 | 4 | 194.6 | 7.1 | 7.1 | 19.83 | 7.40 | 66.1 | 74.1 |
| 100 | 5 | 197.4 | 7.2 | 7.3 | 20.53 | 7.36 | 66.2 | 74.3 |
| 100 | 6 | 198.1 | 7.2 | 7.4 | 20.40 | 7.16 | 66.6 | 73.6 |
| 100 | 7 | 199.9 | 7.2 | 7.2 | 20.26 | 7.32 | 66.2 | 68.1 |

[0625] Another analysis approach is presented in Table 27. The table comprises the four locations where the response to nitrogen was the greatest which suggests that available residual nitrogen was lowest. This approach does not alter the assessment that the nitrogen rate significantly impacted yield, which strains did not when averaged across all nitrogen rates. However, the numerical yield advantage at the lowest N rate is more pronounced for all strains, particularly C1006, CM029, and CM029/CM081 where yields were increased from 8 to 10 bu/acre. At 15% MRTN, strain CM081 outyielded UTC by 5 bu.

TABLE 27
Yield data across four locations
4 Location Average - SGS, Agldea, Bennett, RFR

| | | | | | Stalk Diameter | Internode |
|---|---|---|---|---|---|---|
| | | YLD (bu) | Vigor_E | Vigor_L | (mm) | Length (in) |
| MRTN % | | | | | | |
| 0 | | 137.8 | 7.3 | 5.84 | 18.10 | 5.36 |
| 15 | | 162.1 | 7.5 | 6.63 | 18.75 | 5.40 |
| 85 | | 199.2 | 7.4 | 7.93 | 19.58 | 5.62 |
| 100 | | 203.5 | 7.5 | 8.14 | 19.83 | 5.65 |
| Strain | | | | | | |
| CI006 (1) | | 175.4 | 7.5 | 7.08 | 19.03 | 5.59 |
| CM029 (2) | | 176.1 | 7.4 | 7.08 | 19.09 | 5.39 |
| CM038 (3) | | 175.3 | 7.5 | 7.05 | 19.01 | 5.59 |
| CI019 (4) | | 174.8 | 7.5 | 7.16 | 19.02 | 5.45 |
| CM081 (5) | | 176.7 | 7.4 | 7.16 | 19.00 | 5.53 |
| CM029/CM081 (6) | | 175.1 | 7.4 | 7.17 | 19.33 | 5.46 |
| UTC (7) | | 176.0 | 7.3 | 7.27 | 18.98 | 5.55 |
| MRTN/Strain | | | | | | |
| 0 | 1 | 140.0 | 7.3 | 5.69 | 18.32 | 5.28 |
| 0 | 2 | 140.7 | 7.4 | 5.69 | 18.19 | 5.23 |
| 0 | 3 | 135.5 | 7.3 | 5.63 | 17.95 | 5.50 |
| 0 | 4 | 138.8 | 7.3 | 5.81 | 17.99 | 5.36 |
| 0 | 5 | 136.3 | 7.3 | 6.06 | 18.05 | 5.34 |
| 0 | 6 | 141.4 | 7.5 | 6.00 | 18.43 | 5.30 |
| 0 | 7 | 131.9 | 7.3 | 6.00 | 17.75 | 5.48 |
| 15 | 1 | 158.0 | 7.6 | 6.44 | 18.53 | 5.34 |
| 15 | 2 | 164.1 | 7.5 | 6.56 | 19.13 | 5.42 |
| 15 | 3 | 164.3 | 7.6 | 6.63 | 18.68 | 5.51 |
| 15 | 4 | 163.5 | 7.6 | 6.81 | 18.84 | 5.34 |
| 15 | 5 | 166.8 | 7.5 | 6.63 | 18.60 | 5.39 |
| 15 | 6 | 156.6 | 7.4 | 6.56 | 18.86 | 5.41 |
| 15 | 7 | 161.3 | 7.5 | 6.81 | 18.62 | 5.42 |
| 85 | 1 | 199.4 | 7.6 | 8.00 | 19.15 | 5.63 |
| 85 | 2 | 199.0 | 7.4 | 8.09 | 19.49 | 5.46 |
| 85 | 3 | 198.2 | 7.4 | 7.75 | 19.88 | 5.69 |
| 85 | 4 | 196.8 | 7.4 | 8.00 | 19.65 | 5.60 |
| 85 | 5 | 199.5 | 7.4 | 7.75 | 19.26 | 5.70 |
| 85 | 6 | 198.7 | 7.3 | 7.81 | 19.99 | 5.61 |
| 85 | 7 | 202.8 | 7.2 | 8.13 | 19.66 | 5.65 |
| 100 | 1 | 204.3 | 7.4 | 8.19 | 20.11 | 6.10 |
| 100 | 2 | 200.6 | 7.3 | 8.00 | 19.53 | 5.46 |
| 100 | 3 | 203.3 | 7.7 | 8.19 | 19.55 | 5.67 |
| 100 | 4 | 200.2 | 7.6 | 8.00 | 19.59 | 5.49 |
| 100 | 5 | 203.9 | 7.4 | 8.19 | 20.08 | 5.68 |
| 100 | 6 | 203.8 | 7.5 | 8.31 | 20.05 | 5.52 |
| 100 | 7 | 208.1 | 7.4 | 8.13 | 19.90 | 5.63 |

[0626] The results from the field trial are also illustrated in FIGS. 9-15. The results indicate that the microbes of the disclosure are able to increase plant yield, which points to the ability of the taught microbes to increase nitrogen fixation in an important agricultural crop, i.e. corn.

[0627] The field based results further validate the disclosed methods of non-intergenerically modifying the genome of selected microbial strains, in order to bring about agriculturally relevant results in a field setting when applying said engineered strains to a crop.

[0628] FIG. 6 depicts the lineage of modified remodeled strains that were derived from strain C1006 (WT Kosakonia sacchari). The field data demonstrates that an engineered derivative of the C1006 WT strain, i.e. CM029, is able to bring about numerically relevant results in a field setting. For example, Table 26 illustrates that at 0% MRTN CM029 yielded 147.0 bu/acre compared to untreated control at 141.2 bu/acre (an increase of 5.8 bu/acre). Table 26 also illustrates that at 15% MRTN CM029 yielded 167.3 bu/acre compared to untreated control at 165.1 bu/acre (an increase of 2.2 bu/acre). Table 27 is supportive of these conclusions and illustrates that at 0% MRTN CM029 yielded 140.7 bu/acre compared to untreated control at 131.9 bu/acre (an increase of 8.8 bu/acre). Table 27 also illustrates that at 15% MRTN CM029 yielded 164.1 bu/acre compared to untreated control at 161.3 bu/acre (an increase of 2.8 bu/acre).

[0629] FIG. 7 depicts the lineage of modified remodeled strains that were derived from strain C1019 (WT Rahnella aquatilis). The field data demonstrates that an engineered derivative of the C1019 WT strain, i.e. CM081, is able to bring about numerically relevant results in a field setting. For example, Table 26 illustrates that at 15% MRTN CM081 yielded 169.3 bu/acre compared to untreated control at 165.1 bu/acre (an increase of 4.2 bu/acre). Table 27 is supportive of these conclusions and illustrates that at 0% MRTN CM081 yielded 136.3 bu/acre compared to untreated control at 131.9 bu/acre (an increase of 4.4 bu/acre). Table 27 also illustrates that at 15% MRTN CM081 yielded 166.8 bu/acre compared to untreated control at 161.3 bu/acre (an increase of 5.5 bu/acre).

[0630] Further, one can see in Table 27 that the combination of CM029/CM081 at 0% MRTN yielded 141.4 bu/acre compared to untreated control at 131.9 bu/acre (an increase of 9.5 bu/acre).

### Example 4: Field Trials with Remodeled Microbes of the Disclosure—Summer 2017

[0631] In order to evaluate the efficacy of remodeled strains of the present disclosure on corn growth and productivity under varying nitrogen regimes, field trials were conducted. The below field data demonstrates that the non-intergeneric microbes of the disclosure are able to fix atmospheric nitrogen and deliver said nitrogen to a plant—resulting in increased yields—in both a nitrogen limiting environment, as well as a non-nitrogen limiting environment.

[0632] Trials were conducted at seven locations across the United States with six geographically diverse Midwestern locations. Five nitrogen regimes were used for fertilizer treatments: 100% of standard agricultural practice of the site/region, 100% minus 25 pounds, 100% minus 50 pounds, 100% minus 75 pounds, and 0%; all per acre. The pounds of nitrogen per acre for the 100% regime depended upon the standard agricultural practices of the site/region. The aforementioned nitrogen regimes ranged from about 153 pounds per acre to about 180 pounds per acre, with an average of about 164 pounds of nitrogen per acre.

[0633] Within each fertilizer regime, there were 14 treatments. Each regime had six replications, and a split plot design was utilized. The 14 treatments included: 12 different microbes, 1 UTC with the same fertilizer rate as the main plot, and 1 UTC with 100% nitrogen. In the 100% nitrogen regime the 2nd UTC is 100 plus 25 pounds.

[0634] Plots of corn, at a minimum, were 4 rows of 30 feet in length (30 inches between rows) with 420 plots per location. All observations, unless otherwise noted, were taken from the center two rows of the plants, and all destructive sampling was taken from the outside rows. Seed samples were refrigerated until 1.5 to 2 hours prior to use.

[0635] Local Agricultural Practice: The seed was a commercial corn applied with a commercial seed treatment with no biological co-application. The seeding rate, planting date, weed/insect management, harvest times, and other standard management practices were left to the norms of local agricultural practices for the regions, with the exception of fungicide application (if required).

[0636] Microbe Application: The microbes were applied to the seed in a seed treatment over seeds that had already received a normal chemical treatment. The seed were coated with fermentation broth comprising the microbes.

[0637] Soil Characterization: Soil texture and soil fertility were evaluated. Standard soil sampling procedures were utilized, which included soil cores of depths from 0-30 cm and 30-60 cm. The standard soil sampling included a determination of nitrate nitrogen, ammonium nitrogen, total nitrogen, organic matter, and CEC. Standard soil sampling further included a determination of pH, total potassium, and total phosphorous. To determine the nitrogen fertilizer levels, preplant soil samples from each location were taken to ensure that the 0-12″ and potentially the 12″ to 24″ soil regions for nitrate nitrogen.

[0638] Prior to planting and fertilization, 2 ml soil samples were collected from 0 to 6-12″ from the UTC. One sample per replicate per nitrogen region was collected using the middle of the row. (5 fertilizer regimes×6 replicates=thirty soil samples).

[0639] Post-planting (V4-V6), 2 ml soil samples were collected from 0 to 6-12″ from the UTC. One sample per replicate per nitrogen region was collected using the middle of the row. (5 fertilizer regimes×6 replicates=thirty soil samples).

[0640] Post-harvest (V4-V6), 2 ml soil samples were collected from 0 to 6-12″ from the UTC. One sample per replicate per nitrogen region was collected using the middle of the row. Additional post-harvest soil sample collected at 0-12″ from the UTC and potentially 12-24″ from the UTC (5 fertilizer regimes×6 replicates=thirty soil samples).

[0641] A V6-V10 soil sample from each fertilizer regime (excluding the treatment of 100% and 100%+25 lbs [in the 100% block] for all fertilizer regimes at 0-12″ and 12-24″. (5 fertilizer regimes×2 depths=10 samples per location).

[0642] Post-harvest soil sample from each fertilizer regime (excluding the treatment of 100% and 100%+25 lbs [in the 100% block] for all fertilizer regimes at 0-12″ and 12-24″. (5 fertilizer regimes×2 depths=10 samples per location).

[0643] Assessments: The initial plant population was assessed at ˜50% UTC and the final plant population was assessed prior to harvest. Assessment included (1) potentially temperature (temperature probe); (2) vigor (1-10 scale with 10=excellent) at V4 and V8-V10; (3) plant height at V8-V10 and V14; (4) yield (bushels/acre) adjusted to standard moisture percentage; (5) test weight; (6) grain moisture percentage; (7) stalk nitrate tests at black layer (420 plots×7 locations); (8) colonization with 1 plant per plot in zip lock bag at 0% and 100% fertilizer at V4-V6 (1 plant×14 treatments×6 replicates×2 fertilizer regimes=168 plants); (9) transcriptomics with 1 plant per plot in zip lock bag at 0% and 100% fertilizer at V4-V6 (1 plant×14 treatments×6 replicates×2 fertilizer regimes=168 plants); (10) Normalized difference vegetative index (NDVI) or normalized difference red edge (NDRE) determination using a Greenseeker instrument at two time points (V4-V6 and VT) to assess each plot at all 7 locations (420 plots×2 time points×7 locations=5,880 data points); (11) stalk characteristics measured at all 7 locations between R2 and R5 by recording the stalk diameter of 10 plants/plot at 6″ height, record length of first internode above the 6″ mark, 10 plants monitored (5 consecutive plants from center of two inside rows) (420 plots×10 plants×7 locations=29,400 data points).

[0644] Monitoring Schedule: Practitioners visited all trials at V3-V4 stage to assess early-season response to treatments and during reproductive growth stage to monitor maturity. Local cooperator visited research trial on an on-going basis.

[0645] Weather Information: Weather data spanning from planting to harvest was collected and consisted of daily minimum and maximum temperatures, soil temperature at seeding, daily rainfall plus irrigation (if applied), and unusual weather events such as excessive wind, rain, cold, heat.

[0646] Data Reporting: Including the data indicated above, the field trials generated data points including soil textures; row spacing; plot sizes; irrigation; tillage; previous crop; seeding rate; plant population; seasonal fertilizer inputs including source, rate, timing, and placement; harvest area dimensions, method of harvest, such as by hand or machine and measurement tools used (scales, yield monitor, etc.)

[0647] Results: Select results from the aforementioned field trial are reported in FIG. 16 and FIG. 17.

[0648] In FIG. 16, it can be seen that a remodeled microbe of the disclosure (i.e. 6-403) resulted in a higher yield than the wild type strain (WT) and a higher yield than the untreated control (UTC). The “−25 lbs N” treatment utilizes 25 lbs less N per acre than standard agricultural practices of the region. The “100% N” UTC treatment is meant to depict standard agricultural practices of the region, in which 100% of the standard utilization of N is deployed by the farmer. The microbe “6-403” was deposited as NCMA 201708004 and can be found in Table 1. This is a mutant Kosakonia sacchari (also called CM037) and is a progeny mutant strain from CI006 WT.

[0649] In FIG. 17, the yield results obtained demonstrate that the remodeled microbes of the disclosure perform consistently across locations. Furthermore, the yield results demonstrate that the microbes of the disclosure perform well in both a nitrogen stressed environment (i.e. a nitrogen limiting environment), as well as an environment that has sufficient supplies of nitrogen (i.e. a non-nitrogen-limiting condition). The microbe “6-881” (also known as CM094, PBC6.94), and which is a progeny mutant Kosakonia sacchari strain from CI006 WT, was deposited as NCMA 201708002 and can be found in Table 1. The microbe “137-1034,” which is a progeny mutant Klebsiella variicola strain from CI137 WT, was deposited as NCMA 201712001 and can be found in Table 1. The microbe “137-1036,” which is a progeny mutant Klebsiella variicola strain from CI137 WT, was deposited as NCMA 201712002 and can be found in Table 1. The microbe “6-404” (also known as CM38, PBC6.38), and which is a progeny mutant Kosakonia sacchari strain from CI006 WT, was deposited as NCMA 201708003 and can be found in Table 1.

### Example 5: Genus of Non-Intergeneric Remodeled Microbes Beneficial for Agricultural Systems

[0650] The remodeled microbes of the present disclosure were evaluated and compared against one another for the production of nitrogen produced in an acre across a season. See FIG. 8, FIG. 24, and FIG. 25.

[0651] It is hypothesized by the inventors that in order for a population of engineered non-intergeneric microbes to be beneficial in a modern row crop agricultural system, then the population of microbes needs to produce at least one pound or more of nitrogen per acre per season.

[0652] To that end, the inventors have surprisingly discovered a functional genus of microbes that are able to contribute, inter alia, to: increasing yields in non-leguminous crops; and/or lessening a farmer's dependence upon exogenous nitrogen application; and/or the ability to produce at least one pound of nitrogen per acre per season, even in non-nitrogen-limiting environments, said genus being defined by the product of colonization ability×mmol of N produced per microbe per hour (i.e. the line partitioning FIGS. 8, 24, and 25).

[0653] With respect to FIGS. 8, 24, and 25, certain data utilizing microbes of the disclosure was aggregated, in order to depict a heatmap of the pounds of nitrogen delivered per acre-season by microbes of the disclosure, which are recorded as a function of microbes per g-fresh weight by mmol of nitrogen/microbe-hr. Below the thin line that transects the larger images are the microbes that deliver less than one pound of nitrogen per acre-season, and above the line are the microbes that deliver greater than one pound of nitrogen per acre-season.

[0654] Field Data & Wild Type Colonization Heatmap: The microbes utilized in the FIG. 8 heatmap were assayed for N production in corn. For the WT strains CI006 and CI019, corn root colonization data was taken from a single field site. For the remaining strains, colonization was assumed to be the same as the WT field level. N-fixation activity was determined using an in vitro ARA assay at 5 mM glutamine. The table below the heatmap in FIG. 8 gives the precise value of mmol N produced per microbe per hour (mmol N/Microbe hr) along with the precise CFU per gram of fresh weight (CFU/g fw) for each microbe shown in the heatmap.

[0655] Field Data Heatmap: The data utilized in the FIG. 24 heatmap is derived from microbial strains assayed for N production in corn in field conditions. Each point represents lb N/acre produced by a microbe using corn root colonization data from a single field site. N-fixation activity was determined using in vitro ARA assay at 5 mM N in the form of glutamine or ammonium phosphate. The below Table 28 gives the precise value of mmol N produced per microbe per hour (mmol N/Microbe hr) along with the precise CFU per gram of fresh weight (CFU/g fw) for each microbe shown in the heatmap of FIG. 24.

[0656] Greenhouse & Laboratory Data Heatmap: The data utilized in the FIG. 25 heatmap is derived from microbial strains assayed for N production in corn in laboratory and greenhouse conditions. Each point represents lb N/acre produced by a single strain. White points represent strains in which corn root colonization data was gathered in greenhouse conditions. Black points represent mutant strains for which corn root colonization levels are derived from average field corn root colonization levels of the wild-type parent strain. Hatched points represent the wild type parent strains at their average field corn root colonization levels. In all cases, N-fixation activity was determined by in vitro ARA assay at 5 mM N in the form of glutamine or ammonium phosphate. The below Table 29 gives the precise value of mmol N produced per microbe per hour (mmol N/Microbe hr) along with the precise CFU per gram of fresh weight (CFU/g fw) for each microbe shown in the heatmap of FIG. 25.

TABLE 28
FIG. 24 - Field Data Heatmap

| | Activity | Peak | | |
|---|---|---|---|---|
| Strain | (mmol N/ | Colonization | N Produced/ | |
| Name | Microbe hr) | (CFU/g fw) | acre season | Taxonomic Designation |
| CI006 | 3.88E−16 | 1.50E+07 | 0.24 | Kosakonia sacchari |
| 6-404 | 1.61E−13 | 3.50E+05 | 2.28 | Kosakonia sacchari |
| 6-848 | 1.80E−13 | 2.70E+05 | 1.97 | Kosakonia sacchari |
| 6-881 | 1.58E−13 | 5.00E+05 | 3.20 | Kosakonia sacchari |
| 6-412 | 4.80E−14 | 1.30E+06 | 2.53 | Kosakonia sacchari |
| 6-403 | 1.90E−13 | 1.30E+06 | 10.00 | Kosakonia sacchari |
| CI019 | 5.33E−17 | 2.40E+06 | 0.01 | Rahnella aquatilis |
| 19-806 | 6.65E−14 | 2.90E+06 | 7.80 | Rahnella aquatilis |
| 19-750 | 8.90E−14 | 2.60E+05 | 0.94 | Rahnella aquatilis |
| 19-804 | 1.72E−14 | 4.10E+05 | 0.29 | Rahnella aquatilis |
| CI137 | 3.24E−15 | 6.50E+06 | 0.85 | Klebsiella variicola |
| 137-1034 | 1.16E−14 | 6.30E+06 | 2.96 | Klebsiella variicola |
| 137-1036 | 3.47E−13 | 1.30E+07 | 182.56 | Klebsiella variicola |
| 137-1314 | 1.70E−13 | 1.99E+04 | 0.14 | Klebsiella variicola |
| 137-1329 | 1.65E−13 | 7.25E+04 | 0.48 | Klebsiella variicola |
| 63 | 3.60E−17 | 3.11E+05 | 0.00 | Rahnella aquatilis |
| 63-1146 | 1.90E−14 | 5.10E+05 | 0.39 | Rahnella aquatilis |
| 1021 | 1.77E−14 | 2.69E+07 | 19.25 | Kosakonia pseudosacchari |
| 728 | 5.56E−14 | 1445240.09 | 3.25 | Klebsiella variicola |

TABLE 29
FIG. 25 - Greenhouse & Laboratory Data Heatmap

| | Activity | Peak | | |
|---|---|---|---|---|
| Strain | (mmol N/ | Colonization | N Produced/ | |
| Name | Microbe hr) | (CFU/g fw) | acre season | Taxonomic Designation |
| CI006 | 3.88E−16 | 1.50E+07 | 0.24 | Kosakonia sacchari |
| 6-400 | 2.72E−13 | 1.79E+05 | 1.97 | Kosakonia sacchari |
| 6-397 | 1.14E−14 | 1.79E+05 | 0.08 | Kosakonia sacchari |
| CI137 | 3.24E−15 | 6.50E+06 | 0.85 | Klebsiella variicola |
| 137-1586 | 1.10E−13 | 1.82E+06 | 8.10 | Klebsiella variicola |
| 137-1382 | 4.81E−12 | 1.82E+06 | 354.60 | Klebsiella variicola |
| 1021 | 1.77E−14 | 2.69E+07 | 19.25 | Kosakonia pseudosacchari |
| 1021-1615 | 1.20E−13 | 2.69E+07 | 130.75 | Kosakonia pseudosacchari |
| 1021-1619 | 3.93E−14 | 2.69E+07 | 42.86 | Kosakonia pseudosacchari |
| 1021-1612 | 1.20E−13 | 2.69E+07 | 130.75 | Kosakonia pseudosacchari |
| 1021-1623 | 4.73E−17 | 2.69E+07 | 0.05 | Kosakonia pseudosacchari |
| 1293 | 5.44E−17 | 8.70E+08 | 1.92 | Azospirillum lipoferum |
| 1116 | 1.05E−14 | 1.37E+07 | 5.79 | Enterobacter sp. |
| 1113 | 8.05E−15 | 4.13E+07 | 13.45 | Enterobacter sp. |
| 910 | 1.19E−13 | 1.34E+06 | 6.46 | Kluyvera intermedia |
| 910-1246 | 2.16E−13 | 1.34E+06 | 11.69 | Kluyvera intermedia |
| 850 | 7.2301E−16 | 1.17E+06 | 0.03 | Achromobacter spiritinus |
| 852 | 5.96E−16 | 1.07E+06 | 0.03 | Achromobacter marplatensis |
| 853 | 6.42E−16 | 2.55E+06 | 0.07 | Microbacterium murale |

[0657] Conclusions: The data in FIGS. 8, 24, 25, and Tables 28 and 29, illustrates more than a dozen representative members of the described genus (i.e. microbes to the right of the line in the figures). Further, these numerous representative members come from a diverse array of taxonomic genera, which can be found in the above Tables 28 and 29. Further still, the inventors have discovered numerous genetic attributes that depict a structure/function relationship that is found in many of the microbes. These genetic relationships can be found in the numerous tables of the disclosure setting forth the genetic modifications introduced by the inventors, which include introducing at least one genetic variation into at least one gene, or non-coding polynucleotide, of the nitrogen fixation or assimilation genetic regulatory network.

[0658] Consequently, the newly discovered genus is supported by: (1) a robust dataset, (2) over a dozen representative members, (3) members from diverse taxonomic genera, and (4) classes of genetic modifications that define a structure/function relationship, in the underlying genetic architecture of the genus members.

### Example 6: Methods and Assays for Detection of Non-Intergeneric Remodeled Microbes

[0659] The present disclosure teaches primers, probes, and assays that are useful for detecting the microbes utilized in the various aforementioned Examples. The assays are able to detect the non-natural nucleotide “junction” sequences in the derived/mutant non-intergeneric remodeled microbes. These non-naturally occurring nucleotide junctions can be used as a type of diagnostic that is indicative of the presence of a particular genetic alteration in a microbe.

[0660] The present techniques are able to detect these non-naturally occurring nucleotide junctions via the utilization of specialized quantitative PCR methods, including uniquely designed primers and probes. The probes can bind to the non-naturally occurring nucleotide junction sequences. That is, sequence-specific DNA probes consisting of oligonucleotides that are labelled with a fluorescent reporter, which permits detection only after hybridization of the probe with its complementary sequence can be used. The quantitative methods can ensure that only the non-naturally occurring nucleotide junction will be amplified via the taught primers, and consequently can be detected via either a non-specific dye, or via the utilization of a specific hybridization probe. Another aspect of the method is to choose primers such that the primers flank either side of a junction sequence, such that if an amplification reaction occurs, then said junction sequence is present.

[0661] Consequently, genomic DNA can be extracted from samples and used to quantify the presence of microbes of the disclosure by using qPCR. The primers utilized in the qPCR reaction can be primers designed by Primer Blast (www.ncbi.nlm.nih.gov/tools/primer-blast/) to amplify unique regions of the wild-type genome or unique regions of the engineered non-intergeneric mutant strains. The qPCR reaction can be carried out using the SYBR GreenER qPCR SuperMix Universal (Thermo Fisher P/N 11762100) kit, using only forward and reverse amplification primers; alternatively, the Kapa Probe Force kit (Kapa Biosystems P/N KK4301) can be used with amplification primers and a TaqMan probe containing a FAM dye label at the 5′ end, an internal ZEN quencher, and a minor groove binder and fluorescent quencher at the 3′ end (Integrated DNA Technologies).

[0662] Certain primer, probe, and non-native junction sequences—which can be used in the qPCR methods—are listed in the below Table 30. Specifically, the non-native junction sequences can be found in SEQ ID NOs: 372-405 and 425-430.

TABLE 30
Microbial Detection

| | | up/ | | | | | | | | | | |
|---|---|---|---|---|---|---|---|---|---|---|---|---|
| | | down | | | | 100 bp | | Junction | | | | |
| | Junc- | stream | SEQ | 100 bp | SEQ | downstream | SEQ | SEQ “/” | | F | R | |
| base | tion | junc- | ID | upstream of | ID | of | ID | indicating | Junction | primer | primer | Probe |
| CI | Name | tion | NO | junction | NO | junction | NO | junction | des. | SEQ | SEQ | SEQ |
| 1021 | ds1131 | up | 304 | TGGTGTCCGGGC | 338 | TTCTTGGTTCTCT | 372 | 5′- | disrupted | N/A | N/A | N/A |
| | | | | GAACGTCGCCAG | | GGAGCGCTTTAT | | TGGTGTCCGGGC | nifL gene/ | | | |
| | | | | GTGGCACAAATT | | CGGCATCCTGAC | | GAACGTCGCCAG | PinfC | | | |
| | | | | GTCAGAACTACG | | TGAAGAATTTGC | | GTGGCACAAATT | | | | |
| | | | | ACACGACTAACC | | AGGCTTCTTCCCA | | GTCAGAACTACG | | | | |
| | | | | GACCGCAGGAGT | | ACCTGGCTTGCA | | ACACGACTAACC | | | | |
| | | | | GTGCGATGACCC | | CCCGTGCAGGTA | | GACCGCAGGAGT | | | | |
| | | | | TGAATATGATGA | | GTTGTGATGAAC | | GTGCGATGACCC | | | | |
| | | | | TGGA | | AT | | TGAATATGATGA | | | | |
| | | | | | | | | TGGA/ | | | | |
| | | | | | | | | TTCTTGGTTCTC | | | | |
| | | | | | | | | TGGAGCGCTTTA | | | | |
| | | | | | | | | TCGGCATCCTGA | | | | |
| | | | | | | | | CTGAAGAATTTG | | | | |
| | | | | | | | | CAGGCTTCTTCC | | | | |
| | | | | | | | | CAACCTGGCTTG | | | | |
| | | | | | | | | CACCCGTGCAGG | | | | |
| | | | | | | | | TAGTTGTGATGA | | | | |
| | | | | | | | | ACAT-3′ | | | | |
| 1021 | ds1131 | down | 305 | CGGAAAACGAGT | 339 | GCGATAGAACTC | 373 | 5′- | PinfC/ | N/A | N/A | N/A |
| | | | | TCAAACGGCGCG | | ACTTCACGCCCC | | CGGAAAACGAGT | disrupted | | | |
| | | | | TCCCAATCGTATT | | GAAGGGGGAAGC | | TCAAACGGCGCG | nifL gene | | | |
| | | | | AATGGCGAGATT | | TGCCTGACCCTAC | | TCCCAATCGTAT | | | | |
| | | | | CGCGCCACGGAA | | GATTCCCGCTATT | | TAATGGCGAGAT | | | | |
| | | | | GTTCGCTTAACAG | | TCATTCACTGACC | | TCGCGCCACGGA | | | | |
| | | | | GTCTGGAAGGCG | | GGAGGTTCAAAA | | AGTTCGCTTAAC | | | | |
| | | | | AGCAGCTTGGTA | | TGACCCAGCGAA | | AGGTCTGGAAGG | | | | |
| | | | | TT | | C | | CGAGCAGCTTGG | | | | |
| | | | | | | | | TATT/ | | | | |
| | | | | | | | | GCGATAGAACTC | | | | |
| | | | | | | | | ACTTCACGCCCC | | | | |
| | | | | | | | | GAAGGGGGAAGC | | | | |
| | | | | | | | | TGCCTGACCCTA | | | | |
| | | | | | | | | CGATTCCCGCTA | | | | |
| | | | | | | | | TTTCATTCACTG | | | | |
| | | | | | | | | ACCGGAGGTTCA | | | | |
| | | | | | | | | AAATGACCCAGC | | | | |
| | | | | | | | | GAAC-3′ | | | | |
| 1021 | ds1133 | N/A | 306 | CGCCAGAGAGTT | 340 | TCCCTGTGCGCCG | 374 | 5′- | 5′ UTR | N/A | N/A | N/A |
| | | | | GAAATCGAACAT | | CGTCGCCGATGG | | CGCCAGAGAGTT | and ATG/ | | | |
| | | | | TTCCGTAATACCG | | TGGCCAGCCAAC | | GAAATCGAACAT | truncated | | | |
| | | | | CCATTACCCAGG | | TGGCGCGCTACC | | TTCCGTAATACC | glnE gene | | | |
| | | | | AGCCGTTCTGGTT | | CGATCCTGCTCG | | GCCATTACCCAG | | | | |
| | | | | GCACAGCGGAAA | | ATGAACTGCTCG | | GAGCCGTTCTGG | | | | |
| | | | | ACGTTAACGAAA | | ACCCGAACACGC | | TTGCACAGCGGA | | | | |
| | | | | GGATATTTCGCAT | | TCTATCAACCGA | | AAACGTTAACGA | | | | |
| | | | | G | | CGG | | AAGGATATTTCG | | | | |
| | | | | | | | | CATG/ | | | | |
| | | | | | | | | TCCCTGTGCGCC | | | | |
| | | | | | | | | GCGTCGCCGATG | | | | |
| | | | | | | | | GTGGCCAGCCAA | | | | |
| | | | | | | | | CTGGCGCGCTAC | | | | |
| | | | | | | | | CCGATCCTGCTC | | | | |
| | | | | | | | | GATGAACTGCTC | | | | |
| | | | | | | | | GACCCGAACACG | | | | |
| | | | | | | | | CTCTATCAACCG | | | | |
| | | | | | | | | ACGG-3′ | | | | |
| 1021 | ds1145 | up | 307 | CGGGCGAACGTC | 341 | CGTTCTGTAATAA | 375 | 5′- | disrupted | N/A | N/A | N/A |
| | | | | GCCAGGTGGCAC | | TAACCGGACAAT | | CGGGCGAACGTC | nifL gene/ | | | |
| | | | | AAATTGTCAGAA | | TCGGACTGATTA | | GCCAGGTGGCAC | Prm1 | | | |
| | | | | CTACGACACGAC | | AAAAAGCGCCCT | | AAATTGTCAGAA | | | | |
| | | | | TAACCGACCGCA | | CGCGGCGCTTTTT | | CTACGACACGAC | | | | |
| | | | | GGAGTGTGCGAT | | TTATATTCTCGAC | | TAACCGACCGCA | | | | |
| | | | | GACCCTGAATAT | | TCCATTTAAAATA | | GGAGTGTGCGAT | | | | |
| | | | | GATGATGGATGC | | AAAAATCCAATC | | GACCCTGAATAT | | | | |
| | | | | CAGC | | | | GATGATGGATGC | | | | |
| | | | | | | | | CAGC/ | | | | |
| | | | | | | | | CGTTCTGTAATA | | | | |
| | | | | | | | | ATAACCGGACAA | | | | |
| | | | | | | | | TTCGGACTGATT | | | | |
| | | | | | | | | AAAAAAGCGCCC | | | | |
| | | | | | | | | TCGCGGCGCTTT | | | | |
| | | | | | | | | TTTTATATTCTC | | | | |
| | | | | | | | | GACTCCATTTAA | | | | |
| | | | | | | | | AATAAAAAATCC | | | | |
| | | | | | | | | AATC-3′ | | | | |
| 1021 | ds1145 | down | 308 | TCAACCTAAAAA | 342 | AACTCACTTCAC | 376 | 5′- | Prm1/ | N/A | N/A | N/A |
| | | | | AGTTTGTGTAATA | | GCCCCGAAGGGG | | TCAACCTAAAAA | disrupted | | | |
| | | | | CTTGTAACGCTAC | | GAAGCTGCCTGA | | AGTTTGTGTAAT | nifL gene | | | |
| | | | | ATGGAGATTAAC | | CCCTACGATTCCC | | ACTTGTAACGCT | | | | |
| | | | | TCAATCTAGAGG | | GCTATTTCATTCA | | ACATGGAGATTA | | | | |
| | | | | GTATTAATAATG | | CTGACCGGAGGT | | ACTCAATCTAGA | | | | |
| | | | | AATCGTACTAAA | | TCAAAATGACCC | | GGGTATTAATAA | | | | |
| | | | | CTGGTACTGGGC | | AGCGAACCGAGT | | TGAATCGTACTA | | | | |
| | | | | GC | | CG | | AACTGGTACTGG | | | | |
| | | | | | | | | GCGC/ | | | | |
| | | | | | | | | AACTCACTTCAC | | | | |
| | | | | | | | | GCCCCGAAGGGG | | | | |
| | | | | | | | | GAAGCTGCCTGA | | | | |
| | | | | | | | | CCCTACGATTCC | | | | |
| | | | | | | | | CGCTATTTCATT | | | | |
| | | | | | | | | CACTGACCGGAG | | | | |
| | | | | | | | | GTTCAAAATGAC | | | | |
| | | | | | | | | CCAGCGAACCGA | | | | |
| | | | | | | | | GTCG-3′ | | | | |
| 1021 | ds1148 | up | 309 | CGGGCGAACGTC | 343 | CGCGTCAGGTTG | 377 | 5′- | disrupted | N/A | N/A | N/A |
| | | | | GCCAGGTGGCAC | | AACGTAAAAAAG | | CGGGCGAACGTC | nifL gene/ | | | |
| | | | | AAATTGTCAGAA | | TCGGTCTGCGCA | | GCCAGGTGGCAC | Prm7 | | | |
| | | | | CTACGACACGAC | | AAGCACGTCGTC | | AAATTGTCAGAA | | | | |
| | | | | TAACCGACCGCA | | GTCCGCAGTTCTC | | CTACGACACGAC | | | | |
| | | | | GGAGTGTGCGAT | | CAAACGTTAATT | | TAACCGACCGCA | | | | |
| | | | | GACCCTGAATAT | | GGTTTCTGCTTCG | | GGAGTGTGCGAT | | | | |
| | | | | GATGATGGATGC | | GCAGAACGATTG | | GACCCTGAATAT | | | | |
| | | | | CAGC | | GC | | GATGATGGATGC | | | | |
| | | | | | | | | CAGC/ | | | | |
| | | | | | | | | CGCGTCAGGTTG | | | | |
| | | | | | | | | AACGTAAAAAAG | | | | |
| | | | | | | | | TCGGTCTGCGCA | | | | |
| | | | | | | | | AAGCACGTCGTC | | | | |
| | | | | | | | | GTCCGCAGTTCT | | | | |
| | | | | | | | | CCAAACGTTAAT | | | | |
| | | | | | | | | TGGTTTCTGCTT | | | | |
| | | | | | | | | CGGCAGAACGAT | | | | |
| | | | | | | | | TGGC-3′ | | | | |
| 1021 | ds1148 | down | 310 | AATTTTCTGCCCA | 344 | AACTCACTTCAC | 378 | 5′- | Prm4/ | N/A | N/A | N/A |
| | | | | AATGGCTGGGAT | | GCCCCGAAGGGG | | AATTTTCTGCCC | disrupted | | | |
| | | | | TGTTCATTTTTTG | | GAAGCTGCCTGA | | AAATGGCTGGGA | nifL gene | | | |
| | | | | TTTGCCTTACAAC | | CCCTACGATTCCC | | TTGTTCATTTTT | | | | |
| | | | | GAGAGTGACAGT | | GCTATTTCATTCA | | TGTTTGCCTTAC | | | | |
| | | | | ACGCGCGGGTAG | | CTGACCGGAGGT | | AACGAGAGTGAC | | | | |
| | | | | TTAACTCAACATC | | TCAAAATGACCC | | AGTACGCGCGGG | | | | |
| | | | | TGACCGGTCGAT | | AGCGAACCGAGT | | TAGTTAACTCAA | | | | |
| | | | | | | CG | | CATCTGACCGGT | | | | |
| | | | | | | | | CGAT/ | | | | |
| | | | | | | | | AACTCACTTCAC | | | | |
| | | | | | | | | GCCCCGAAGGGG | | | | |
| | | | | | | | | GAAGCTGCCTGA | | | | |
| | | | | | | | | CCCTACGATTCC | | | | |
| | | | | | | | | CGCTATTTCATT | | | | |
| | | | | | | | | CACTGACCGGAG | | | | |
| | | | | | | | | GTTCAAAATGAC | | | | |
| | | | | | | | | CCAGCGAACCGA | | | | |
| | | | | | | | | GTCG-3′ | | | | |
| CI006 | ds126 | N/A | 311 | GTAACCAATAAA | 345 | CCGATCCCCATC | 379 | 5′- | 5′ UTR up | N/A | N/A | N/A |
| | | | | GGCCACCACGCC | | ACTGTGTGTCTTG | | GTAACCAATAAA | to ATG- | | | |
| | | | | AGACCACACGAT | | TATTACAGTGCC | | GGCCACCACGCC | 4 bp of | | | |
| | | | | AGTGATGGCAAC | | GCTTCGTCGGCTT | | AGACCACACGAT | amtB gene/ | | | |
| | | | | ACTTTCCAGCTGC | | CGCCGGTACGAA | | AGTGATGGCAAC | disrupted | | | |
| | | | | ACCAGCACCTGA | | TACGAATGACGC | | ACTTTCCAGCTG | amtB gene | | | |
| | | | | TGGCCCATGGTC | | GTTGCAGCTCAG | | CACCAGCACCTG | | | | |
| | | | | ACACCTTCAGCG | | CAACGAAAATTT | | ATGGCCCATGGT | | | | |
| | | | | AAA | | TG | | CACACCTTCAGC | | | | |
| | | | | | | | | GAAA/ | | | | |
| | | | | | | | | CCGATCCCCATC | | | | |
| | | | | | | | | ACTGTGTGTCTT | | | | |
| | | | | | | | | GTATTACAGTGC | | | | |
| | | | | | | | | CGCTTCGTCGGC | | | | |
| | | | | | | | | TTCGCCGGTACG | | | | |
| | | | | | | | | AATACGAATGAC | | | | |
| | | | | | | | | GCGTTGCAGCTC | | | | |
| | | | | | | | | AGCAACGAAAAT | | | | |
| | | | | | | | | TTTG-3′ | | | | |
| CI019 | ds172 | down | 312 | TGGTATTGTCAGT | 346 | CCGTCTCTGAAG | 380 | 5′- | Prm1.2/ | SEQ | SEQ | N/A |
| | | | | CTGAATGAAGCT | | CTCTCGGTGAAC | | TGGTATTGTCAG | disrupted | ID | ID | |
| | | | | CTTGAAAAAGCT | | ATTGTTGCGAGG | | TCTGAATGAAGC | nifL gene | NO: | NO: | |
| | | | | GAGGAAGCGGGC | | CAGGATGCGAGC | | TCTTGAAAAAGC | | 406 | 407 | |
| | | | | GTCGATTTAGTAG | | TGGTTGTGTTTTG | | TGAGGAAGCGGG | | CAAG | TGCC | |
| | | | | AAATCAGTCCGA | | ACATTACCGATA | | CGTCGATTTAGT | | AAGT | TCGC | |
| | | | | ATGCCGAGCCGC | | ATGTGCCGCGTG | | AGAAATCAGTCC | | TCGC | AACA | |
| | | | | CAGTTTGTCGAAT | | AACGGGTGCGTT | | GAATGCCGAGCC | | CTCA | ATGT | |
| | | | | C | | ATG | | GCCAGTTTGTCG | | CAGG | TCAC | |
| | | | | | | | | AATC/ | | | | |
| | | | | | | | | CCGTCTCTGAAG | | | | |
| | | | | | | | | CTCTCGGTGAAC | | | | |
| | | | | | | | | ATTGTTGCGAGG | | | | |
| | | | | | | | | CAGGATGCGAGC | | | | |
| | | | | | | | | TGGTTGTGTTTT | | | | |
| | | | | | | | | GACATTACCGAT | | | | |
| | | | | | | | | AATGTGCCGCGT | | | | |
| | | | | | | | | GAACGGGTGCGT | | | | |
| | | | | | | | | TATG-3′ | | | | |
| CI019 | ds172 | up | 313 | ACCGATCCGCAG | 347 | TGAACATCACTG | 381 | 5′- | disrupted | N/A | N/A | N/A |
| | | | | GCGCGCATTTGTT | | ATGCACAAGCTA | | ACCGATCCGCAG | nifL gene/ | | | |
| | | | | ATGCCAATCCGG | | CCTATGTCGAAG | | GCGCGCATTTGT | Prm1.2 | | | |
| | | | | CATTCTGCCGCCA | | AATTAACTAAAA | | TATGCCAATCCG | | | | |
| | | | | GACGGGTTTTGC | | AACTGCAAGATG | | GCATTCTGCCGC | | | | |
| | | | | ACTTGAGACACTT | | CAGGCATTCGCG | | CAGACGGGTTTT | | | | |
| | | | | TTGGGCGAGAAC | | TTAAAGCCGACT | | GCACTTGAGACA | | | | |
| | | | | CACCGTCTGCTGG | | TGAGAAATGAGA | | CTTTTGGGCGAG | | | | |
| | | | | | | AGAT | | AACCACCGTCTG | | | | |
| | | | | | | | | CTGG/ | | | | |
| | | | | | | | | TGAACATCACTG | | | | |
| | | | | | | | | ATGCACAAGCTA | | | | |
| | | | | | | | | CCTATGTCGAAG | | | | |
| | | | | | | | | AATTAACTAAAA | | | | |
| | | | | | | | | AACTGCAAGATG | | | | |
| | | | | | | | | CAGGCATTCGCG | | | | |
| | | | | | | | | TTAAAGCCGACT | | | | |
| | | | | | | | | TGAGAAATGAGA | | | | |
| | | | | | | | | AGAT-3′ | | | | |
| CI019 | ds175 | down | 314 | CGGGAACCGGTG | 348 | CCGTCTCTGAAG | 382 | 5′- | Prm3.1/ | SEQ | SEQ | SEQ |
| | | | | TTATAATGCCGCG | | CTCTCGGTGAAC | | CGGGAACCGGTG | disrupted | ID | ID | ID |
| | | | | CCCTCATATTGTG | | ATTGTTGCGAGG | | TTATAATGCCGC | nifL gene | NO: | NO: | NO: |
| | | | | GGGATTTCTTAAT | | CAGGATGCGAGC | | GCCCTCATATTG | | 408 | 409 | 410/ |
| | | | | GACCTATCCTGG | | TGGTTGTGTTTTG | | TGGGGATTTCTT | | CGCC | GGCA | 56- |
| | | | | GTCCTAAAGTTGT | | ACATTACCGATA | | AATGACCTATCC | | CTCA | TAAC | FAM/ |
| | | | | AGTTGACATTAG | | ATGTGCCGCGTG | | TGGGTCCTAAAG | | TATT | GCAC | TA |
| | | | | CGGAGCACTAAC | | AACGGGTGCGTT | | TTGTAGTTGACA | | GTGG | CCGT | ACC |
| | | | | | | ATG | | TTAGCGGAGCAC | | GGAT | TCA | CGT |
| | | | | | | | | TAAC/ | | | | C/ |
| | | | | | | | | CCGTCTCTGAAG | | | | ZEN/ |
| | | | | | | | | CTCTCGGTGAAC | | | | TCTG |
| | | | | | | | | ATTGTTGCGAGG | | | | AAG |
| | | | | | | | | CAGGATGCGAGC | | | | CTC |
| | | | | | | | | TGGTTGTGTTTT | | | | TCG |
| | | | | | | | | GACATTACCGAT | | | | GT/ |
| | | | | | | | | AATGTGCCGCGT | | | | 3IAB |
| | | | | | | | | GAACGGGTGCGT | | | | kFQ/ |
| | | | | | | | | TATG-3′ | | | | |
| CI019 | ds175 | up | 315 | ACCGATCCGCAG | 349 | TACAGTAGCGCC | 383 | 5′- | disrupted | N/A | N/A | N/A |
| | | | | GCGCGCATTTGTT | | TCTCAAAAATAG | | ACCGATCCGCAG | nifL gene/ | | | |
| | | | | ATGCCAATCCGG | | ATAAACGGCTCA | | GCGCGCATTTGT | Prm3.1 | | | |
| | | | | CATTCTGCCGCCA | | TGTACGTGGGCC | | TATGCCAATCCG | | | | |
| | | | | GACGGGTTTTGC | | GTTTATTTTTTCT | | GCATTCTGCCGC | | | | |
| | | | | ACTTGAGACACTT | | ACCCATAATCGG | | CAGACGGGTTTT | | | | |
| | | | | TTGGGCGAGAAC | | GAACCGGTGTTA | | GCACTTGAGACA | | | | |
| | | | | CACCGTCTGCTGG | | TAATGCCGCGCC | | CTTTTGGGCGAG | | | | |
| | | | | | | CTC | | AACCACCGTCTG | | | | |
| | | | | | | | | CTGG/ | | | | |
| | | | | | | | | TACAGTAGCGCC | | | | |
| | | | | | | | | TCTCAAAAATAG | | | | |
| | | | | | | | | ATAAACGGCTCA | | | | |
| | | | | | | | | TGTACGTGGGCC | | | | |
| | | | | | | | | GTTTATTTTTTC | | | | |
| | | | | | | | | TACCCATAATCG | | | | |
| | | | | | | | | GGAACCGGTGTT | | | | |
| | | | | | | | | ATAATGCCGCGC | | | | |
| | | | | | | | | CCTC-3′ | | | | |
| CI006 | ds20 | down | 316 | TCAACCTAAAAA | 350 | AACTCACTTCAC | 384 | 5′- | Prm1/ | SEQ | SEQ | SEQ |
| | | | | AGTTTGTGTAATA | | ACCCCGAAGGGG | | TCAACCTAAAAA | disrupted | ID | ID | ID |
| | | | | CTTGTAACGCTAC | | GAAGTTGCCTGA | | AGTTTGTGTAAT | nifL gene | NO: | NO: | NO: |
| | | | | ATGGAGATTAAC | | CCCTACGATTCCC | | ACTTGTAACGCT | | 411 | 412 | 413 |
| | | | | TCAATCTAGAGG | | GCTATTTCATTCA | | ACATGGAGATTA | | TAAA | CAAA | /56- |
| | | | | GTATTAATAATG | | CTGACCGGAGGT | | ACTCAATCTAGA | | CTGG | TCGA | FAM/ |
| | | | | AATCGTACTAAA | | TCAAAATGACCC | | GGGTATTAATAA | | TACT | AGCG | AAG |
| | | | | CTGGTACTGGGC | | AGCGAACCGAGT | | TGAATCGTACTA | | GGGC | CCAG | TTGC |
| | | | | GC | | CG | | AACTGGTACTGG | | GCAA | ACGG | CT/ |
| | | | | | | | | GCGC/ | | CT | TAT | ZEN/ |
| | | | | | | | | AACTCACTTCAC | | | | GACC |
| | | | | | | | | ACCCCGAAGGGG | | | | CTAC |
| | | | | | | | | GAAGTTGCCTGA | | | | GATT |
| | | | | | | | | CCCTACGATTCC | | | | CCC/ |
| | | | | | | | | CGCTATTTCATT | | | | 3IAB |
| | | | | | | | | CACTGACCGGAG | | | | kFQ/ |
| | | | | | | | | GTTCAAAATGAC | | | | |
| | | | | | | | | CCAGCGAACCGA | | | | |
| | | | | | | | | GTCG-3′ | | | | |
| CI006 | ds20 | up | 317 | GGGCGACAAACG | 351 | CGTCCTGTAATA | 385 | 5′- | disrupted | N/A | N/A | N/A |
| | | | | GCCTGGTGGCAC | | ATAACCGGACAA | | GGGCGACAAACG | nifL gene/ | | | |
| | | | | AAATTGTCAGAA | | TTCGGACTGATTA | | GCCTGGTGGCAC | Prm1 | | | |
| | | | | CTACGACACGAC | | AAAAAGCGCCCT | | AAATTGTCAGAA | | | | |
| | | | | TAACTGACCGCA | | TGTGGCGCTTTTT | | CTACGACACGAC | | | | |
| | | | | GGAGTGTGCGAT | | TTATATTCCCGCC | | TAACTGACCGCA | | | | |
| | | | | GACCCTGAATAT | | TCCATTTAAAATA | | GGAGTGTGCGAT | | | | |
| | | | | GATGATGGATGC | | AAAAATCCAATC | | GACCCTGAATAT | | | | |
| | | | | CGGC | | | | GATGATGGATGC | | | | |
| | | | | | | | | CGGC/ | | | | |
| | | | | | | | | CGTCCTGTAATA | | | | |
| | | | | | | | | ATAACCGGACAA | | | | |
| | | | | | | | | TTCGGACTGATT | | | | |
| | | | | | | | | AAAAAAGCGCCC | | | | |
| | | | | | | | | TTGTGGCGCTTT | | | | |
| | | | | | | | | TTTTATATTCCC | | | | |
| | | | | | | | | GCCTCCATTTAA | | | | |
| | | | | | | | | AATAAAAAATCC | | | | |
| | | | | | | | | AATC-3′ | | | | |
| CI006 | ds24 | up | 318 | GGGCGACAAACG | 352 | GGACATCATCGC | 386 | 5′- | disrupted | SEQ | SEQ | SEQ |
| | | | | GCCTGGTGGCAC | | GACAAACAATAT | | GGGCGACAAACG | nifL gene/ | ID | ID | ID |
| | | | | AAATTGTCAGAA | | TAATACCGGCAA | | GCCTGGTGGCAC | Prm5 | NO: | NO: | NO: |
| | | | | CTACGACACGAC | | CCACACCGGCAA | | AAATTGTCAGAA | | 414 | 415 | 416 |
| | | | | TAACTGACCGCA | | TTTACGAGACTG | | CTACGACACGAC | | GGTG | GCGC | /56- |
| | | | | GGAGTGTGCGAT | | CGCAGGCATCCT | | TAACTGACCGCA | | CACT | AGTC | FAM/ |
| | | | | GACCCTGAATAT | | TTCTCCCGTCAAT | | GGAGTGTGCGAT | | CTTT | TCGT | CA |
| | | | | GATGATGGATGC | | TTCTGTCAAATAA | | GACCCTGAATAT | | GCAT | AAAT | GGA |
| | | | | CGGC | | AG | | GATGATGGATGC | | GGTT | TGCC | GTG |
| | | | | | | | | CGGC/ | | | | T/ |
| | | | | | | | | GGACATCATCGC | | | | ZEN/ |
| | | | | | | | | GACAAACAATAT | | | | GCGA |
| | | | | | | | | TAATACCGGCAA | | | | TGA |
| | | | | | | | | CCACACCGGCAA | | | | CCC |
| | | | | | | | | TTTACGAGACTG | | | | TGA |
| | | | | | | | | CGCAGGCATCCT | | | | AT/ |
| | | | | | | | | TTCTCCCGTCAA | | | | 3IAB |
| | | | | | | | | TTTCTGTCAAAT | | | | kFQ |
| | | | | | | | | AAAG-3′ | | | | |
| CI006 | ds24 | down | 319 | TAAGAATTATCTG | 353 | AACTCACTTCAC | 387 | 5′- | Prm5/ | N/A | N/A | N/A |
| | | | | GATGAATGTGCC | | ACCCCGAAGGGG | | TAAGAATTATCT | disrupted | | | |
| | | | | ATTAAATGCGCA | | GAAGTTGCCTGA | | GGATGAATGTGC | nifL gene | | | |
| | | | | GCATAATGGTGC | | CCCTACGATTCCC | | CATTAAATGCGC | | | | |
| | | | | GTTGTGCGGGAA | | GCTATTTCATTCA | | AGCATAATGGTG | | | | |
| | | | | AACTGCTTTTTTT | | CTGACCGGAGGT | | CGTTGTGCGGGA | | | | |
| | | | | TGAAAGGGTTGG | | TCAAAATGACCC | | AAACTGCTTTTT | | | | |
| | | | | TCAGTAGCGGAA | | AGCGAACCGAGT | | TTTGAAAGGGTT | | | | |
| | | | | AC | | CG | | GGTCAGTAGCGG | | | | |
| | | | | | | | | AAAC/ | | | | |
| | | | | | | | | AACTCACTTCAC | | | | |
| | | | | | | | | ACCCCGAAGGGG | | | | |
| | | | | | | | | GAAGTTGCCTGA | | | | |
| | | | | | | | | CCCTACGATTCC | | | | |
| | | | | | | | | CGCTATTTCATT | | | | |
| | | | | | | | | CACTGACCGGAG | | | | |
| | | | | | | | | GTTCAAAATGAC | | | | |
| | | | | | | | | CCAGCGAACCGA | | | | |
| | | | | | | | | GTCG-3′ | | | | |
| CI006 | ds30 | N/A | 320 | CGCCAGAGAGTC | 354 | TTTAACGATCTGA | 388 | 5′- | 5′ UTR | N/A | N/A | N/A |
| | | | | GAAATCGAACAT | | TTGGCGATGATG | | CGCCAGAGAGTC | and ATG/ | | | |
| | | | | TTCCGTAATACCG | | AAACGGATTCGC | | GAAATCGAACAT | truncated | | | |
| | | | | CGATTACCCAGG | | CGGAAGATGCGC | | TTCCGTAATACC | glnE gene | | | |
| | | | | AGCCGTTCTGGTT | | TTTCTGAGAGCTG | | GCGATTACCCAG | | | | |
| | | | | GCACAGCGGAAA | | GCGCGAATTGTG | | GAGCCGTTCTGG | | | | |
| | | | | ACGTTAACGAAA | | GCAGGATGCGTT | | TTGCACAGCGGA | | | | |
| | | | | GGATATTTCGCAT | | GCAGGAGGAGGA | | AAACGTTAACGA | | | | |
| | | | | G | | TT | | AAGGATATTTCG | | | | |
| | | | | | | | | CATG/ | | | | |
| | | | | | | | | TTTAACGATCTG | | | | |
| | | | | | | | | ATTGGCGATGAT | | | | |
| | | | | | | | | GAAACGGATTCG | | | | |
| | | | | | | | | CCGGAAGATGCG | | | | |
| | | | | | | | | CTTTCTGAGAGC | | | | |
| | | | | | | | | TGGCGCGAATTG | | | | |
| | | | | | | | | TGGCAGGATGCG | | | | |
| | | | | | | | | TTGCAGGAGGAG | | | | |
| | | | | | | | | GATT-3′ | | | | |
| CI006 | ds31 | N/A | 321 | CGCCAGAGAGTC | 355 | GCACTGAAACAC | 389 | 5′- | 5′ UTR | N/A | N/A | N/A |
| | | | | GAAATCGAACAT | | CTCATTTCCCTGT | | CGCCAGAGAGTC | and ATG/ | | | |
| | | | | TTCCGTAATACCG | | GTGCCGCGTCGC | | GAAATCGAACAT | truncated | | | |
| | | | | CGATTACCCAGG | | CGATGGTTGCCA | | TTCCGTAATACC | glnE gene | | | |
| | | | | AGCCGTTCTGGTT | | GTCAGCTGGCGC | | GCGATTACCCAG | | | | |
| | | | | GCACAGCGGAAA | | GCTACCCGATCCT | | GAGCCGTTCTGG | | | | |
| | | | | ACGTTAACGAAA | | GCTTGATGAATT | | TTGCACAGCGGA | | | | |
| | | | | GGATATTTCGCAT | | GCTCGACCCGAA | | AAACGTTAACGA | | | | |
| | | | | G | | TA | | AAGGATATTTCG | | | | |
| | | | | | | | | CATG/ | | | | |
| | | | | | | | | GCACTGAAACAC | | | | |
| | | | | | | | | CTCATTTCCCTG | | | | |
| | | | | | | | | TGTGCCGCGTCG | | | | |
| | | | | | | | | CCGATGGTTGCC | | | | |
| | | | | | | | | AGTCAGCTGGCG | | | | |
| | | | | | | | | CGCTACCCGATC | | | | |
| | | | | | | | | CTGCTTGATGAA | | | | |
| | | | | | | | | TTGCTCGACCCG | | | | |
| | | | | | | | | AATA-3′ | | | | |
| CI019 | ds34 | N/A | 322 | GATGATGGATGC | 356 | GCGCTCAAACAG | 390 | 5′- | 5′ UTR | N/A | N/A | N/A |
| | | | | TTTCTGGTTAAAC | | TTAATCCGTCTGT | | GATGATGGATGC | and ATG/ | | | |
| | | | | GGGCAACCTCGT | | GTGCCGCCTCGC | | TTTCTGGTTAAA | truncated | | | |
| | | | | TAACTGACTGACT | | CGATGGTCGCGA | | CGGGCAACCTCG | glnE gene | | | |
| | | | | AGCCTGGGCAAA | | CACAACTTGCAC | | TTAACTGACTGA | | | | |
| | | | | CTGCCCGGGCTTT | | GTCATCCTTTATT | | CTAGCCTGGGCA | | | | |
| | | | | TTTTTGCAAGGAA | | GCTCGATGAACT | | AACTGCCCGGGC | | | | |
| | | | | TCTGATTTCATG | | GCTCGACCCGCG | | TTTTTTTTGCAA | | | | |
| | | | | | | CA | | GGAATCTGATTT | | | | |
| | | | | | | | | CATG/ | | | | |
| | | | | | | | | GCGCTCAAACAG | | | | |
| | | | | | | | | TTAATCCGTCTG | | | | |
| | | | | | | | | TGTGCCGCCTCG | | | | |
| | | | | | | | | CCGATGGTCGCG | | | | |
| | | | | | | | | ACACAACTTGCA | | | | |
| | | | | | | | | CGTCATCCTTTA | | | | |
| | | | | | | | | TTGCTCGATGAA | | | | |
| | | | | | | | | CTGCTCGACCCG | | | | |
| | | | | | | | | CGCA-3′ | | | | |
| CI019 | ds70 | up | 323 | ACCGATCCGCAG | 357 | AGTCTGAACTCA | 391 | 5′- | disrupted | N/A | N/A | N/A |
| | | | | GCGCGCATTTGTT | | TCCTGCGGCAGT | | ACCGATCCGCAG | nifL gene/ | | | |
| | | | | ATGCCAATCCGG | | CGGTGAGACGTA | | GCGCGCATTTGT | Prm4 | | | |
| | | | | CATTCTGCCGCCA | | TTTTTGACCAAAG | | TATGCCAATCCG | | | | |
| | | | | GACGGGTTTTGC | | AGTGATCTACAT | | GCATTCTGCCGC | | | | |
| | | | | ACTTGAGACACTT | | CACGGAATTTTGT | | CAGACGGGTTTT | | | | |
| | | | | TTGGGCGAGAAC | | GGTTGTTGCTGCT | | GCACTTGAGACA | | | | |
| | | | | CACCGTCTGCTGG | | TAAAAGGGCAAA | | CTTTTGGGCGAG | | | | |
| | | | | | | T | | AACCACCGTCTG | | | | |
| | | | | | | | | CTGG/ | | | | |
| | | | | | | | | AGTCTGAACTCA | | | | |
| | | | | | | | | TCCTGCGGCAGT | | | | |
| | | | | | | | | CGGTGAGACGTA | | | | |
| | | | | | | | | TTTTTGACCAAA | | | | |
| | | | | | | | | GAGTGATCTACA | | | | |
| | | | | | | | | TCACGGAATTTT | | | | |
| | | | | | | | | GTGGTTGTTGCT | | | | |
| | | | | | | | | GCTTAAAAGGGC | | | | |
| | | | | | | | | AAAT-3′ | | | | |
| CI019 | ds70 | down | 324 | CATCGGACACCA | 358 | CCGTCTCTGAAG | 392 | 5′- | Prm4/ | N/A | N/A | N/A |
| | | | | CCAGCTTACAAA | | CTCTCGGTGAAC | | CATCGGACACCA | disrupted | | | |
| | | | | TTGCCTGATTGCG | | ATTGTTGCGAGG | | CCAGCTTACAAA | nifL gene | | | |
| | | | | GCCCCGATGGCC | | CAGGATGCGAGC | | TTGCCTGATTGC | | | | |
| | | | | GGTATCACTGAC | | TGGTTGTGTTTTG | | GGCCCCGATGGC | | | | |
| | | | | CGACCATTTCGTG | | ACATTACCGATA | | CGGTATCACTGA | | | | |
| | | | | CCTTATGTCATGC | | ATGTGCCGCGTG | | CCGACCATTTCG | | | | |
| | | | | GATGGGGGCTGG | | AACGGGTGCGTT | | TGCCTTATGTCA | | | | |
| | | | | G | | ATG | | TGCGATGGGGGC | | | | |
| | | | | | | | | TGGG/ | | | | |
| | | | | | | | | CCGTCTCTGAAG | | | | |
| | | | | | | | | CTCTCGGTGAAC | | | | |
| | | | | | | | | ATTGTTGCGAGG | | | | |
| | | | | | | | | CAGGATGCGAGC | | | | |
| | | | | | | | | TGGTTGTGTTTT | | | | |
| | | | | | | | | GACATTACCGAT | | | | |
| | | | | | | | | AATGTGCCGCGT | | | | |
| | | | | | | | | GAACGGGTGCGT | | | | |
| | | | | | | | | TATG-3′ | | | | |
| 137 | ds799 | down | 325 | TCTTCAACAACTG | 359 | GCCATTGAGCTG | 393 | 5′- | PinfC/ | SEQ | SEQ | SEQ |
| | | | | GAGGAATAAGGT | | GCTTCCCGACCG | | TCTTCAACAACT | disrupted | ID | ID | ID |
| | | | | ATTAAAGGCGGA | | CAGGGCGGCACC | | GGAGGAATAAGG | nifL gene | NO: | NO: | NO: |
| | | | | AAACGAGTTCAA | | TGCCTGACCCTGC | | TATTAAAGGCGG | | 417 | 418 | 419/ |
| | | | | ACGGCACGTCCG | | GTTTCCCGCTGTT | | AAAACGAGTTCA | | CTCG | AGGG | 56- |
| | | | | AATCGTATCAAT | | TAACACCCTGAC | | AACGGCACGTCC | | GCAG | TGTT | FAM/ |
| | | | | GGCGAGATTCGC | | CGGAGGTGAAGC | | GAATCGTATCAA | | CATG | AAAC | AA |
| | | | | GCCCTGGAAGTT | | ATGATCCCTGAA | | TGGCGAGATTCG | | GACG | AGCG | CGG |
| | | | | CGC | | TC | | CGCCCTGGAAGT | | TAA | GGAA | CAC |
| | | | | | | | | TCGC/ | | | A | G/ |
| | | | | | | | | GCCATTGAGCTG | | | | ZEN/ |
| | | | | | | | | GCTTCCCGACCG | | | | TCCG |
| | | | | | | | | CAGGGCGGCACC | | | | AAT |
| | | | | | | | | TGCCTGACCCTG | | | | CGT |
| | | | | | | | | CGTTTCCCGCTG | | | | ATC |
| | | | | | | | | TTTAACACCCTG | | | | AA/ |
| | | | | | | | | ACCGGAGGTGAA | | | | 3IAB |
| | | | | | | | | GCATGATCCCTG | | | | kFQ/ |
| | | | | | | | | AATC-3′ | | | | |
| 137 | ds799 | up | 326 | TCCGGGTTCGGCT | 360 | AGCGTCAGGTAC | 394 | 5′- | disrupted | N/A | N/A | N/A |
| | | | | TACCCCGCCGCGT | | CGGTCATGATTC | | TCCGGGTTCGGC | nifL gene/ | | | |
| | | | | TTTGCGCACGGTG | | ACCGTGCGATTCT | | TTACCCCGCCGC | PinfC | | | |
| | | | | TCGGACAATTTGT | | CGGTTCCCTGGA | | GTTTTGCGCACG | | | | |
| | | | | CATAACTGCGAC | | GCGCTTCATTGGC | | GTGTCGGACAAT | | | | |
| | | | | ACAGGAGTTTGC | | ATCCTGACCGAA | | TTGTCATAACTG | | | | |
| | | | | GATGACCCTGAA | | GAGTTCGCTGGC | | CGACACAGGAGT | | | | |
| | | | | TATGATGCTCGA | | TTCTTCCCAACCT | | TTGCGATGACCC | | | | |
| | | | | | | G | | TGAATATGATGC | | | | |
| | | | | | | | | TCGA/ | | | | |
| | | | | | | | | AGCGTCAGGTAC | | | | |
| | | | | | | | | CGGTCATGATTC | | | | |
| | | | | | | | | ACCGTGCGATTC | | | | |
| | | | | | | | | TCGGTTCCCTGG | | | | |
| | | | | | | | | AGCGCTTCATTG | | | | |
| | | | | | | | | GCATCCTGACCG | | | | |
| | | | | | | | | AAGAGTTCGCTG | | | | |
| | | | | | | | | GCTTCTTCCCAA | | | | |
| | | | | | | | | CCTG-3′ | | | | |
| 137 | ds809 | N/A | 327 | ATCGCAGCGTCTT | 361 | GCGCTGAAGCAC | 395 | 5′- | 5′ UTR | SEQ | SEQ | SEQ |
| | | | | TGAATATTTCCGT | | CTGATCACGCTCT | | ATCGCAGCGTCT | and ATG/ | ID | ID | ID |
| | | | | CGCCAGGCGCTG | | GCGCGGCGTCGC | | TTGAATATTTCC | truncated | NO: | NO: | NO: |
| | | | | GCTGCCGAGCCG | | CGATGGTCGCCA | | GTCGCCAGGCGC | glnE gene | 420 | 421 | 422/ |
| | | | | TTCTGGCTGCATA | | GCCAGCTGGCGC | | TGGCTGCCGAGC | | GAGC | GCCG | 56- |
| | | | | GTGGAAAACGAT | | GCCACCCGCTGC | | CGTTCTGGCTGC | | CGTT | TCGG | FAM/ |
| | | | | AATTTCAGGCCA | | TGCTGGATGAGC | | ATAGTGGAAAAC | | CTGG | CTGA | TTAT |
| | | | | GGGAGCCCTTAT | | TGCTGGATCCCA | | GATAATTTCAGG | | CTGC | TAGA | GGC |
| | | | | G | | ACA | | CCAGGGAGCCCT | | ATAG | GG | GC/ |
| | | | | | | | | TATG/ | | | | ZEN/ |
| | | | | | | | | GCGCTGAAGCAC | | | | TGAA |
| | | | | | | | | CTGATCACGCTC | | | | GCA |
| | | | | | | | | TGCGCGGCGTCG | | | | CCTG |
| | | | | | | | | CCGATGGTCGCC | | | | ATC |
| | | | | | | | | AGCCAGCTGGCG | | | | A/ |
| | | | | | | | | CGCCACCCGCTG | | | | 3IAB |
| | | | | | | | | CTGCTGGATGAG | | | | kFQ/ |
| | | | | | | | | CTGCTGGATCCC | | | | |
| | | | | | | | | AACA-3′ | | | | |
| 137 | ds843 | up | 328 | TCCGGGTTCGGCT | 362 | GCCCGCTGACCG | 396 | 5′- | disrupted | N/A | N/A | N/A |
| | | | | TACCCCGCCGCGT | | ACCAGAACTTCC | | TCCGGGTTCGGC | nifL gene/ | | | |
| | | | | TTTGCGCACGGTG | | ACCTTGGACTCG | | TTACCCCGCCGC | Prm1.2 | | | |
| | | | | TCGGACAATTTGT | | GCTATACCCTTGG | | GTTTTGCGCACG | | | | |
| | | | | CATAACTGCGAC | | CGTGACGGCGCG | | GTGTCGGACAAT | | | | |
| | | | | ACAGGAGTTTGC | | CGATAACTGGGA | | TTGTCATAACTG | | | | |
| | | | | GATGACCCTGAA | | CTACATCCCCATT | | CGACACAGGAGT | | | | |
| | | | | TATGATGCTCGA | | CCGGTGATCTTAC | | TTGCGATGACCC | | | | |
| | | | | | | C | | TGAATATGATGC | | | | |
| | | | | | | | | TCGA/ | | | | |
| | | | | | | | | GCCCGCTGACCG | | | | |
| | | | | | | | | ACCAGAACTTCC | | | | |
| | | | | | | | | ACCTTGGACTCG | | | | |
| | | | | | | | | GCTATACCCTTG | | | | |
| | | | | | | | | GCGTGACGGCGC | | | | |
| | | | | | | | | GCGATAACTGGG | | | | |
| | | | | | | | | ACTACATCCCCA | | | | |
| | | | | | | | | TTCCGGTGATCT | | | | |
| | | | | | | | | TACC-3′ | | | | |
| 137 | ds843 | down | 329 | TCACTTTTTAGCA | 363 | GCCATTGAGCTG | 397 | 5′- | Prm1.2/ | N/A | N/A | N/A |
| | | | | AAGTTGCACTGG | | GCTTCCCGACCG | | TCACTTTTTAGC | disrupted | | | |
| | | | | ACAAAAGGTACC | | CAGGGCGGCACC | | AAAGTTGCACTG | nifL gene | | | |
| | | | | ACAATTGGTGTA | | TGCCTGACCCTGC | | GACAAAAGGTAC | | | | |
| | | | | CTGATACTCGAC | | GTTTCCCGCTGTT | | CACAATTGGTGT | | | | |
| | | | | ACAGCATTAGTG | | TAACACCCTGAC | | ACTGATACTCGA | | | | |
| | | | | TCGATTTTTCATA | | CGGAGGTGAAGC | | CACAGCATTAGT | | | | |
| | | | | TAAAGGTAATTTT | | ATGATCCCTGAA | | GTCGATTTTTCA | | | | |
| | | | | G | | TC | | TATAAAGGTAAT | | | | |
| | | | | | | | | TTTG/ | | | | |
| | | | | | | | | GCCATTGAGCTG | | | | |
| | | | | | | | | GCTTCCCGACCG | | | | |
| | | | | | | | | CAGGGCGGCACC | | | | |
| | | | | | | | | TGCCTGACCCTG | | | | |
| | | | | | | | | CGTTTCCCGCTG | | | | |
| | | | | | | | | TTTAACACCCTG | | | | |
| | | | | | | | | ACCGGAGGTGAA | | | | |
| | | | | | | | | GCATGATCCCTG | | | | |
| | | | | | | | | AATC-3′ | | | | |
| 137 | ds853 | up | 330 | TCCGGGTTCGGCT | 364 | GCTAAAGTTCTC | 398 | 5′- | disrupted | N/A | N/A | N/A |
| | | | | TACCCCGCCGCGT | | GGCTAATCGCTG | | TCCGGGTTCGGC | nifL gene/ | | | |
| | | | | TTTGCGCACGGTG | | ATAACATTTGAC | | TTACCCCGCCGC | Prm6.2 | | | |
| | | | | TCGGACAATTTGT | | GCAATGCGCAAT | | GTTTTGCGCACG | | | | |
| | | | | CATAACTGCGAC | | AAAAGGGCATCA | | GTGTCGGACAAT | | | | |
| | | | | ACAGGAGTTTGC | | TTTGATGCCCTTT | | TTGTCATAACTG | | | | |
| | | | | GATGACCCTGAA | | TTGCACGCTTTCA | | CGACACAGGAGT | | | | |
| | | | | TATGATGCTCGA | | TACCAGAACCTG | | TTGCGATGACCC | | | | |
| | | | | | | GC | | TGAATATGATGC | | | | |
| | | | | | | | | TCGA/ | | | | |
| | | | | | | | | GCTAAAGTTCTC | | | | |
| | | | | | | | | GGCTAATCGCTG | | | | |
| | | | | | | | | ATAACATTTGAC | | | | |
| | | | | | | | | GCAATGCGCAAT | | | | |
| | | | | | | | | AAAAGGGCATCA | | | | |
| | | | | | | | | TTTGATGCCCTT | | | | |
| | | | | | | | | TTTGCACGCTTT | | | | |
| | | | | | | | | CATACCAGAACC | | | | |
| | | | | | | | | TGGC-3′ | | | | |
| 137 | ds853 | down | 331 | GTTCTCCTTTGCA | 365 | GCCATTGAGCTG | 399 | 5′- | Prm6.2/ | N/A | N/A | N/A |
| | | | | ATAGCAGGGAAG | | GCTTCCCGACCG | | GTTCTCCTTTGC | disrupted | | | |
| | | | | AGGCGCCAGAAC | | CAGGGCGGCACC | | AATAGCAGGGAA | nifL gene | | | |
| | | | | CGCCAGCGTTGA | | TGCCTGACCCTGC | | GAGGCGCCAGAA | | | | |
| | | | | AGCAGTTTGAAC | | GTTTCCCGCTGTT | | CCGCCAGCGTTG | | | | |
| | | | | GCGTTCAGTGTAT | | TAACACCCTGAC | | AAGCAGTTTGAA | | | | |
| | | | | AATCCGAAACTT | | CGGAGGTGAAGC | | CGCGTTCAGTGT | | | | |
| | | | | AATTTCGGTTTGG | | ATGATCCCTGAA | | ATAATCCGAAAC | | | | |
| | | | | A | | TC | | TTAATTTCGGTT | | | | |
| | | | | | | | | TGGA/ | | | | |
| | | | | | | | | GCCATTGAGCTG | | | | |
| | | | | | | | | GCTTCCCGACCG | | | | |
| | | | | | | | | CAGGGCGGCACC | | | | |
| | | | | | | | | TGCCTGACCCTG | | | | |
| | | | | | | | | CGTTTCCCGCTG | | | | |
| | | | | | | | | TTTAACACCCTG | | | | |
| | | | | | | | | ACCGGAGGTGAA | | | | |
| | | | | | | | | GCATGATCCCTG | | | | |
| | | | | | | | | AATC-3′ | | | | |
| 137 | ds857 | up | 332 | TCCGGGTTCGGCT | 366 | CGCCGTCCTCGC | 400 | 5′- | disrupted | N/A | N/A | N/A |
| | | | | TACCCCGCCGCGT | | AGTACCATTGCA | | TCCGGGTTCGGC | nifL gene/ | | | |
| | | | | TTTGCGCACGGTG | | ACCGACTTTACA | | TTACCCCGCCGC | Prm8.2 | | | |
| | | | | TCGGACAATTTGT | | GCAAGAAGTGAT | | GTTTTGCGCACG | | | | |
| | | | | CATAACTGCGAC | | TCTGGCACGCAT | | GTGTCGGACAAT | | | | |
| | | | | ACAGGAGTTTGC | | GGAACAAATTCT | | TTGTCATAACTG | | | | |
| | | | | GATGACCCTGAA | | TGCCAGTCGGGC | | CGACACAGGAGT | | | | |
| | | | | TATGATGCTCGA | | TTTATCCGATGAC | | TTGCGATGACCC | | | | |
| | | | | | | GAA | | TGAATATGATGC | | | | |
| | | | | | | | | TCGA/ | | | | |
| | | | | | | | | CGCCGTCCTCGC | | | | |
| | | | | | | | | AGTACCATTGCA | | | | |
| | | | | | | | | ACCGACTTTACA | | | | |
| | | | | | | | | GCAAGAAGTGAT | | | | |
| | | | | | | | | TCTGGCACGCAT | | | | |
| | | | | | | | | GGAACAAATTCT | | | | |
| | | | | | | | | TGCCAGTCGGGC | | | | |
| | | | | | | | | TTTATCCGATGA | | | | |
| | | | | | | | | CGAA-3′ | | | | |
| 137 | ds857 | down | 333 | GATATGCCTGAA | 367 | GCCATTGAGCTG | 401 | 5′- | Prm8.2/ | N/A | N/A | N/A |
| | | | | GTATTCAATTACT | | GCTTCCCGACCG | | GATATGCCTGAA | disrupted | | | |
| | | | | TAGGCATTTACTT | | CAGGGCGGCACC | | GTATTCAATTAC | nifL gene | | | |
| | | | | AACGCAGGCAGG | | TGCCTGACCCTGC | | TTAGGCATTTAC | | | | |
| | | | | CAATTTTGATGCT | | GTTTCCCGCTGTT | | TTAACGCAGGCA | | | | |
| | | | | GCCTATGAAGCG | | TAACACCCTGAC | | GGCAATTTTGAT | | | | |
| | | | | TTTGATTCTGTAC | | CGGAGGTGAAGC | | GCTGCCTATGAA | | | | |
| | | | | TTGAGCTTGATC | | ATGATCCCTGAA | | GCGTTTGATTCT | | | | |
| | | | | | | TC | | GTACTTGAGCTT | | | | |
| | | | | | | | | GATC/ | | | | |
| | | | | | | | | GCCATTGAGCTG | | | | |
| | | | | | | | | GCTTCCCGACCG | | | | |
| | | | | | | | | CAGGGCGGCACC | | | | |
| | | | | | | | | TGCCTGACCCTG | | | | |
| | | | | | | | | CGTTTCCCGCTG | | | | |
| | | | | | | | | TTTAACACCCTG | | | | |
| | | | | | | | | ACCGGAGGTGAA | | | | |
| | | | | | | | | GCATGATCCCTG | | | | |
| | | | | | | | | AATC-3′ | | | | |
| 63 | ds908 | down | 334 | TGGTATTGTCAGT | 368 | TCTTTAGATCTCT | 402 | 5′- | PinfC/ | SEQ | SEQ | N/A |
| | | | | CTGAATGAAGCT | | CGGTCCGCCCTG | | TGGTATTGTCAG | disrupted | ID | ID | |
| | | | | CTTGAAAAAGCT | | ATGGCGGCACCT | | TCTGAATGAAGC | nifL gene | NO: | NO: | |
| | | | | GAGGAAGCGGGC | | TGCTGACGTTAC | | TCTTGAAAAAGC | | 423 | 424 | |
| | | | | GTCGATTTAGTAG | | GCCTGCCGGTAC | | TGAGGAAGCGGG | | GGAA | GGGC | |
| | | | | AAATCAGTCCGA | | AGCAGGTTATCA | | CGTCGATTTAGT | | AACG | GGAC | |
| | | | | ATGCCGAGCCGC | | CCGGAGGCTTAA | | AGAAATCAGTCC | | AGTT | CGAG | |
| | | | | CAGTTTGTCGAAT | | AATGACCCAGTT | | GAATGCCGAGCC | | CAAC | AGAT | |
| | | | | C | | ACC | | GCCAGTTTGTCG | | CGGC | CTAA | |
| | | | | | | | | AATC/ | | | | |
| | | | | | | | | TCTTTAGATCTC | | | | |
| | | | | | | | | TCGGTCCGCCCT | | | | |
| | | | | | | | | GATGGCGGCACC | | | | |
| | | | | | | | | TTGCTGACGTTA | | | | |
| | | | | | | | | CGCCTGCCGGTA | | | | |
| | | | | | | | | CAGCAGGTTATC | | | | |
| | | | | | | | | ACCGGAGGCTTA | | | | |
| | | | | | | | | AAATGACCCAGT | | | | |
| | | | | | | | | TACC-3′ | | | | |
| 63 | ds908 | up | 335 | TGCAAATTGCAC | 369 | TGAATATCACTG | 403 | 5′- | disrupted | N/A | N/A | N/A |
| | | | | GGTTATTCCGGGT | | ACTCACAAGCTA | | TGCAAATTGCAC | nifL gene/ | | | |
| | | | | GAGTATATGTGT | | CCTATGTCGAAG | | GGTTATTCCGGG | PinfC | | | |
| | | | | GATTTGGGTTCCG | | AATTAACTAAAA | | TGAGTATATGTG | | | | |
| | | | | GCATTGCGCAAT | | AACTGCAAGATG | | TGATTTGGGTTC | | | | |
| | | | | AAAGGGGAGAAA | | CAGGCATTCGCG | | CGGCATTGCGCA | | | | |
| | | | | GACATGAGCATC | | TTAAAGCCGACT | | ATAAAGGGGAGA | | | | |
| | | | | ACGGCGTTATCA | | TGAGAAATGAGA | | AAGACATGAGCA | | | | |
| | | | | GC | | AGAT | | TCACGGCGTTAT | | | | |
| | | | | | | | | CAGC/ | | | | |
| | | | | | | | | TGAATATCACTG | | | | |
| | | | | | | | | ACTCACAAGCTA | | | | |
| | | | | | | | | CCTATGTCGAAG | | | | |
| | | | | | | | | AATTAACTAAAA | | | | |
| | | | | | | | | AACTGCAAGATG | | | | |
| | | | | | | | | CAGGCATTCGCG | | | | |
| | | | | | | | | TTAAAGCCGACT | | | | |
| | | | | | | | | TGAGAAATGAGA | | | | |
| | | | | | | | | AGAT-3′ | | | | |
| 910 | ds960 | up | 336 | TCAGGGCTGCGG | 370 | CTGGGGTCACTG | 404 | 5′- | disrupted | N/A | N/A | N/A |
| | | | | ATGTCGGGCGTTT | | GAGCGCTTTATC | | TCAGGGCTGCGG | nifL gene/ | | | |
| | | | | CACAACACAAAA | | GGCATCCTGACC | | ATGTCGGGCGTT | PinfC | | | |
| | | | | TGTTGTAAATGCG | | GAAGAATTTGCC | | TCACAACACAAA | | | | |
| | | | | ACACAGCCGGGC | | GGTTTCTTCCCGA | | ATGTTGTAAATG | | | | |
| | | | | CTGAAACCAGGA | | CCTGGCTGGCCC | | CGACACAGCCGG | | | | |
| | | | | GCGTGTGATGAC | | CTGTTCAGGTTGT | | GCCTGAAACCAG | | | | |
| | | | | CTTTAATATGATG | | GGTGATGAATAT | | GAGCGTGTGATG | | | | |
| | | | | C | | CA | | ACCTTTAATATG | | | | |
| | | | | | | | | ATGC/ | | | | |
| | | | | | | | | CTGGGGTCACTG | | | | |
| | | | | | | | | GAGCGCTTTATC | | | | |
| | | | | | | | | GGCATCCTGACC | | | | |
| | | | | | | | | GAAGAATTTGCC | | | | |
| | | | | | | | | GGTTTCTTCCCG | | | | |
| | | | | | | | | ACCTGGCTGGCC | | | | |
| | | | | | | | | CCTGTTCAGGTT | | | | |
| | | | | | | | | GTGGTGATGAAT | | | | |
| | | | | | | | | ATCA-3′ | | | | |
| 910 | ds960 | down | 337 | CGGAAAACGAGT | 371 | GCAATAGAACTA | 405 | 5′- | PinfC/ | N/A | N/A | N/A |
| | | | | TCAAACGGCACG | | ACTACCCGCCCT | | CGGAAAACGAGT | disrupted | | | |
| | | | | TCCGAATCGTATC | | GAAGGCGGTACC | | TCAAACGGCACG | nifL gene | | | |
| | | | | AATGGCGAGATT | | TGCCTGACCCTGC | | TCCGAATCGTAT | | | | |
| | | | | CGCGCCCAGGAA | | GATTCCCGTTATT | | CAATGGCGAGAT | | | | |
| | | | | GTTCGCTTAACTG | | TCATTCACTGACC | | TCGCGCCCAGGA | | | | |
| | | | | GTCTGGAAGGTG | | GGAGGCCCACGA | | AGTTCGCTTAAC | | | | |
| | | | | AGCAGCTGGGTA | | TGACCCAGCGAC | | TGGTCTGGAAGG | | | | |
| | | | | TT | | C | | TGAGCAGCTGGG | | | | |
| | | | | | | | | TATT/ | | | | |
| | | | | | | | | GCAATAGAACTA | | | | |
| | | | | | | | | ACTACCCGCCCT | | | | |
| | | | | | | | | GAAGGCGGTACC | | | | |
| | | | | | | | | TGCCTGACCCTG | | | | |
| | | | | | | | | CGATTCCCGTTA | | | | |
| | | | | | | | | TTTCATTCACTG | | | | |
| | | | | | | | | ACCGGAGGCCCA | | | | |
| | | | | | | | | CGATGACCCAGC | | | | |
| | | | | | | | | GACC-3′ | | | | |
| 137 | ds2551 | up | 425 | CTTCGGCGGCGT | 427 | GCCCGCTGACCG | 429 | 5′- | 3′ end of | N/A | N/A | N/A |
| | | | | GAAGAAGAGTGG | | ACCAGAACTTCC | | CTTCGGCGGCGT | sad | | | |
| | | | | TTTTGGTCGCGAG | | ACCTTGGACTCG | | GAAGAAGAGTGG | (Succinate | | | |
| | | | | CTGTCACATTTTG | | GCTATACCCTTGG | | TTTTGGTCGCGA | semialdehyde | | | |
| | | | | GTCTGCACGAGTT | | CGTGACGGCGCG | | GCTGTCACATTT | dehydro- | | | |
| | | | | CTGTAATGCGCA | | CGATAACTGGGA | | TGGTCTGCACGA | genase)/ | | | |
| | | | | GACCGTCTGGAA | | CTACATCCCCATT | | GTTCTGTAATGC | Prm1.2 | | | |
| | | | | AGACCGTCGCTA | | CCGGTGATCTTAC | | GCAGACCGTCTG | | | | |
| | | | | A | | C | | GAAAGACCGTCG | | | | |
| | | | | | | | | CTAA/ | | | | |
| | | | | | | | | GCCCGCTGACCG | | | | |
| | | | | | | | | ACCAGAACTTCC | | | | |
| | | | | | | | | ACCTTGGACTCG | | | | |
| | | | | | | | | GCTATACCCTTG | | | | |
| | | | | | | | | GCGTGACGGCGC | | | | |
| | | | | | | | | GCGATAACTGGG | | | | |
| | | | | | | | | ACTACATCCCCA | | | | |
| | | | | | | | | TTCCGGTGATCT | | | | |
| | | | | | | | | TACC-3′ | | | | |
| 137 | ds2551 | down | 426 | TCACTTTTTAGCA | 428 | ATGGCGGCGGTG | 430 | 5′- | Prm1.2/ | N/A | N/A | N/A |
| | | | | AAGTTGCACTGG | | ATCAATAACGCA | | TCACTTTTTAGC | glsA2 | | | |
| | | | | ACAAAAGGTACC | | ATGCTGGAAGCC | | AAAGTTGCACTG | | | | |
| | | | | ACAATTGGTGTA | | ATTCTGGCAGAA | | GACAAAAGGTAC | | | | |
| | | | | CTGATACTCGAC | | ATCAGGCCGCTG | | CACAATTGGTGT | | | | |
| | | | | ACAGCATTAGTG | | ATTGGCCGCGGT | | ACTGATACTCGA | | | | |
| | | | | TCGATTTTTCATA | | AAAGTGGCGGAT | | CACAGCATTAGT | | | | |
| | | | | TAAAGGTAATTTT | | TACATTCCGGCG | | GTCGATTTTTCA | | | | |
| | | | | G | | CTGG | | TATAAAGGTAAT | | | | |
| | | | | | | | | TTTG/ | | | | |
| | | | | | | | | ATGGCGGCGGTG | | | | |
| | | | | | | | | ATCAATAACGCA | | | | |
| | | | | | | | | ATGCTGGAAGCC | | | | |
| | | | | | | | | ATTCTGGCAGAA | | | | |
| | | | | | | | | ATCAGGCCGCTG | | | | |
| | | | | | | | | ATTGGCCGCGGT | | | | |
| | | | | | | | | AAAGTGGCGGAT | | | | |
| | | | | | | | | TACATTCCGGCG | | | | |
| | | | | | | | | CTGG-3′ | | | | |

TABLE 31
Remodeled Non-intergeneric Microbes

| Strain Name | Genotype | SEQ ID NO |
|---|---|---|
| CI006 | 16S rDNA - contig 5 | 62 |
| CI006 | 16S rDNA - contig 8 | 63 |
| CI019 | 16S rDNA | 64 |
| CI006 | nifH | 65 |
| CI006 | nifD | 66 |
| CI006 | nifK | 67 |
| CI006 | nifL | 68 |
| CI006 | nifA | 69 |
| CI019 | nifH | 70 |
| CI019 | nifD | 71 |
| CI019 | nifK | 72 |
| CI019 | nifL | 73 |
| CI019 | nifA | 74 |
| CI006 | Prm5 with 500bp | 75 |
| | flanking regions | |
| CI006 | nifLA operon - upstream | 76 |
| | intergenic region plus | |
| | nifL and nifA CDSs | |
| CI006 | nifL (Amino Acid) | 77 |
| CI006 | nifA (Amino Acid) | 78 |
| CI006 | glnE | 79 |
| CI006 | glnE_KO1 | 80 |
| CI006 | glnE (Amino Acid) | 81 |
| CI006 | glnE_KO1 (Amino Acid) | 82 |
| CI006 | GlnE ATase domain | 83 |
| | (Amino Acid) | |
| CM029 | Prm5 inserted into nifL | 84 |
| | region | |

TABLE 32
Remodeled Non-intergeneric Microbes

| | | | | | Associated |
|---|---|---|---|---|---|
| | | | | | Novel |
| | Strain | SEQ | | | Junction If |
| Strain | ID | ID NO | Genotype | Description | Applicable |
| CI63; | 63 | SEQ ID | 16S | N/A | N/A |
| CI063 | | NO 85 | | | |
| CI63; | 63 | SEQ ID | nifH | N/A | N/A |
| CI063 | | NO 86 | | | |
| CI63; | 63 | SEQ ID | nifD1 | 1 of 2 unique genes annotated as nifD | N/A |
| CI063 | | NO 87 | | in 63 genome | |
| CI63; | 63 | SEQ ID | nifD2 | 2 of 2 unique genes annotated as nifD | N/A |
| CI063 | | NO 88 | | in 63 genome | |
| CI63; | 63 | SEQ ID | nifK1 | 1 of 2 unique genes annotated as nifK | N/A |
| CI063 | | NO 89 | | in 63 genome | |
| CI63; | 63 | SEQ ID | nifK2 | 2 of 2 unique genes annotated as nifK | N/A |
| CI063 | | NO 90 | | in 63 genome | |
| CI63; | 63 | SEQ ID | nifL | N/A | N/A |
| CI063 | | NO 91 | | | |
| CI63; | 63 | SEQ ID | nifA | N/A | N/A |
| CI063 | | NO 92 | | | |
| CI63; | 63 | SEQ ID | glnE | N/A | N/A |
| CI063 | | NO 93 | | | |
| CI63; | 63 | SEQ ID | amtB | N/A | N/A |
| CI063 | | NO 94 | | | |
| CI63; | 63 | SEQ ID | PinfC | 500bp immediately upstream of the | N/A |
| CI063 | | NO 95 | | ATG start codon of the infC gene | |
| CI137 | 137 | SEQ ID | 16S | N/A | N/A |
| | | NO 96 | | | |
| CI137 | 137 | SEQ ID | nifH1 | 1 of 2 unique genes annotated as nifH | N/A |
| | | NO 97 | | in 137 genome | |
| CI137 | 137 | SEQ ID | nifH2 | 2 of 2 unique genes annotated as nifH | N/A |
| | | NO 98 | | in 137 genome | |
| CI137 | 137 | SEQ ID | nifD1 | 1 of 2 unique genes annotated as nifD | N/A |
| | | NO 99 | | in 137 genome | |
| CI137 | 137 | SEQ ID | nifD2 | 2 of 2 unique genes annotated as nifD | N/A |
| | | NO 100 | | in 137 genome | |
| CI137 | 137 | SEQ ID | nifK1 | 1 of 2 unique genes annotated as nifK | N/A |
| | | NO 101 | | in 137 genome | |
| CI137 | 137 | SEQ ID | nifK2 | 2 of 2 unique genes annotated as nifK | N/A |
| | | NO 102 | | in 137 genome | |
| CI137 | 137 | SEQ ID | nifL | N/A | N/A |
| | | NO 103 | | | |
| CI137 | 137 | SEQ ID | nifA | N/A | N/A |
| | | NO 104 | | | |
| CI137 | 137 | SEQ ID | glnE | N/A | N/A |
| | | NO 105 | | | |
| CI137 | 137 | SEQ ID | PinfC | 500bp immediately upstream of the | N/A |
| | | NO 106 | | TTG start codon of infC | |
| CI137 | 137 | SEQ ID | amtB | N/A | N/A |
| | | NO 107 | | | |
| CI137 | 137 | SEQ ID | Prm8.2 | internal promoter located in nlpI gene; | N/A |
| | | NO 108 | | 299bp starting at 81bp after the A of | |
| | | | | the ATG of the nlpI gene | |
| CI137 | 137 | SEQ ID | Prm6.2 | 300bp upstream of the secE gene | N/A |
| | | NO 109 | | starting at 57bp upstream of the A of | |
| | | | | the ATG of secE | |
| CI137 | 137 | SEQ ID | Prm1.2 | 400bp immediately upstream of the | N/A |
| | | NO 110 | | ATG of cspE gene | |
| none | 728 | SEQ ID | 16S | N/A | N/A |
| | | NO 111 | | | |
| none | 728 | SEQ ID | nifH | N/A | N/A |
| | | NO 112 | | | |
| none | 728 | SEQ ID | nifD1 | 1 of 2 unique genes annotated as nifD | N/A |
| | | NO 113 | | in 728 genome | |
| none | 728 | SEQ ID | nifD2 | 2 of 2 unique genes annotated as nifD | N/A |
| | | NO 114 | | in 728 genome | |
| none | 728 | SEQ ID | nifK1 | 1 of 2 unique genes annotated as nifK | N/A |
| | | NO 115 | | in 728 genome | |
| none | 728 | SEQ ID | nifK2 | 2 of 2 unique genes annotated as nifK | N/A |
| | | NO 116 | | in 728 genome | |
| none | 728 | SEQ ID | nifL | N/A | N/A |
| | | NO 117 | | | |
| none | 728 | SEQ ID | nifA | N/A | N/A |
| | | NO 118 | | | |
| none | 728 | SEQ ID | glnE | N/A | N/A |
| | | NO 119 | | | |
| none | 728 | SEQ ID | amtB | N/A | N/A |
| | | NO 120 | | | |
| none | 850 | SEQ ID | 16S | N/A | N/A |
| | | NO 121 | | | |
| none | 852 | SEQ ID | 16S | N/A | N/A |
| | | NO 122 | | | |
| none | 853 | SEQ ID | 16S | N/A | N/A |
| | | NO 123 | | | |
| none | 910 | SEQ ID | 16S | N/A | N/A |
| | | NO 124 | | | |
| none | 910 | SEQ ID | nifH | N/A | N/A |
| | | NO 125 | | | |
| none | 910 | SEQ ID | Dinitrogenase iron- | N/A | N/A |
| | | NO 126 | molybdenum | | |
| | | | cofactor CDS | | |
| none | 910 | SEQ ID | nifD1 | N/A | N/A |
| | | NO 127 | | | |
| none | 910 | SEQ ID | nifD2 | N/A | N/A |
| | | NO 128 | | | |
| none | 910 | SEQ ID | nifK1 | N/A | N/A |
| | | NO 129 | | | |
| none | 910 | SEQ ID | nifK2 | N/A | N/A |
| | | NO 130 | | | |
| none | 910 | SEQ ID | nifL | N/A | N/A |
| | | NO 131 | | | |
| none | 910 | SEQ ID | nifA | N/A | N/A |
| | | NO 132 | | | |
| none | 910 | SEQ ID | glnE | N/A | N/A |
| | | NO 133 | | | |
| none | 910 | SEQ ID | amtB | N/A | N/A |
| | | NO 134 | | | |
| none | 910 | SEQ ID | PinfC | 498bp immediately upstream of the | N/A |
| | | NO 135 | | ATG of the infC gene | |
| none | 1021 | SEQ ID | 16S | N/A | N/A |
| | | NO 136 | | | |
| none | 1021 | SEQ ID | nifH | N/A | N/A |
| | | NO 137 | | | |
| none | 1021 | SEQ ID | nifD1 | 1 of 2 unique genes annotated as nifD | N/A |
| | | NO 138 | | in 910 genome | |
| none | 1021 | SEQ ID | nifD2 | 2 of 2 unique genes annotated as nifD | N/A |
| | | NO 139 | | in 910 genome | |
| none | 1021 | SEQ ID | nifK1 | 1 of 2 unique genes annotated as nifK | N/A |
| | | NO 140 | | in 910 genome | |
| none | 1021 | SEQ ID | nifK2 | 2 of 2 unique genes annotated as nifK | N/A |
| | | NO 141 | | in 910 genome | |
| none | 1021 | SEQ ID | nifL | N/A | N/A |
| | | NO 142 | | | |
| none | 1021 | SEQ ID | nifA | N/A | N/A |
| | | NO 143 | | | |
| none | 1021 | SEQ ID | glnE | N/A | N/A |
| | | NO 144 | | | |
| none | 1021 | SEQ ID | amtB | N/A | N/A |
| | | NO 145 | | | |
| none | 1021 | SEQ ID | PinfC | 500bp immediately upstream of the | N/A |
| | | NO 146 | | ATG start codon of the infC gene | |
| none | 1021 | SEQ ID | Prm1 | 348bp includes the 319bp immediately | N/A |
| | | NO 147 | | upstream of the ATG start codon of the | |
| | | | | lpp gene and the first 29bp of the lpp | |
| | | | | gene | |
| none | 1021 | SEQ ID | Prm7 | 339bp upstream of the sspA gene, | N/A |
| | | NO 148 | | ending at 46bp upstream of the ATG of | |
| | | | | the sspA gene | |
| none | 1113 | SEQ ID | 16S | N/A | N/A |
| | | NO 149 | | | |
| none | 1113 | SEQ ID | nifH | N/A | N/A |
| | | NO 150 | | | |
| none | 1113 | SEQ ID | nifD1 | 1 of 2 unique genes annotated as nifD | N/A |
| | | NO 151 | | in 1113 genome | |
| none | 1113 | SEQ ID | nifD2 | 2 of 2 unique genes annotated as nifD | N/A |
| | | NO 152 | | in 1113 genome | |
| none | 1113 | SEQ ID | nifK | N/A | N/A |
| | | NO 153 | | | |
| none | 1113 | SEQ ID | nifL | N/A | N/A |
| | | NO 154 | | | |
| none | 1113 | SEQ ID | nifA partial gene | due to a gap in the sequence assembly, | N/A |
| | | NO 155 | | we can only identify a partial gene | |
| | | | | from the 1113 genome | |
| none | 1113 | SEQ ID | glnE | N/A | N/A |
| | | NO 156 | | | |
| none | 1116 | SEQ ID | 16S | | N/A |
| | | NO 157 | | | |
| none | 1116 | SEQ ID | nifH | | N/A |
| | | NO 158 | | | |
| none | 1116 | SEQ ID | nifD1 | 1 of 2 unique genes annotated as nifD | N/A |
| | | NO 159 | | in 1116 genome | |
| none | 1116 | SEQ ID | nifD2 | 2 of 2 unique genes annotated as nifD | N/A |
| | | NO 160 | | in 1116 genome | |
| none | 1116 | SEQ ID | nifK1 | 1 of 2 unique genes annotated as nifK | N/A |
| | | NO 161 | | in 1116 genome | |
| none | 1116 | SEQ ID | nifK2 | 2 of 2 unique genes annotated as nifK | N/A |
| | | NO 162 | | in 1116 genome | |
| none | 1116 | SEQ ID | nifL | N/A | N/A |
| | | NO 163 | | | |
| none | 1116 | SEQ ID | nifA | N/A | N/A |
| | | NO 164 | | | |
| none | 1116 | SEQ ID | glnE | N/A | N/A |
| | | NO 165 | | | |
| none | 1116 | SEQ ID | amtB | N/A | N/A |
| | | NO 166 | | | |
| none | 1293 | SEQ ID | 16S | N/A | N/A |
| | | NO 167 | | | |
| none | 1293 | SEQ ID | nifH | N/A | N/A |
| | | NO 168 | | | |
| none | 1293 | SEQ ID | nifD1 | 1 of 2 unique genes annotated as nifD | N/A |
| | | NO 169 | | in 1293 genome | |
| none | 1293 | SEQ ID | nifD2 | 2 of 2 unique genes annotated as nifD | N/A |
| | | NO 170 | | in 1293 genome | |
| none | 1293 | SEQ ID | nifK | 1 of 2 unique genes annotated as nifK | N/A |
| | | NO 171 | | in 1293 genome | |
| none | 1293 | SEQ ID | nifK1 | 2 of 2 unique genes annotated as nifK | N/A |
| | | NO 172 | | in 1293 genome | |
| none | 1293 | SEQ ID | nifA | N/A | N/A |
| | | NO 173 | | | |
| none | 1293 | SEQ ID | glnE | N/A | N/A |
| | | NO 174 | | | |
| none | 1293 | SEQ ID | amtB1 | 1 of 2 unique genes annotated as amtB | N/A |
| | | NO 175 | | in 1293 genome | |
| none | 1293 | SEQ ID | amtB2 | 2 of 2 unique genes annotated as amtB | N/A |
| | | NO 176 | | in 1293 genome | |
| none | 1021-1612 | SEQ ID | ΔnifL::PinfC | starting at 24bp after the A of the ATG | ds1131 |
| | | NO 177 | | start codon, 1375bp of nifL have been | |
| | | | | deleted and replaced with the 1021 | |
| | | | | PinfC promoter sequence | |
| none | 1021-1612 | SEQ ID | ΔnifL::PinfC with | starting at 24bp after the A of the ATG | ds1131 |
| | | NO 178 | 500bp flank | start codon, 1375bp of nifL have been | |
| | | | | deleted and replaced with the 1021 | |
| | | | | PinfC promoter sequence; 500bp | |
| | | | | flanking the nifL gene upstream and | |
| | | | | downstream are included | |
| none | 1021-1612 | SEQ ID | glnEΔAR-2 | glnE gene with 1673bp immediately | ds1133 |
| | | NO 179 | | downstream of the ATG start codon | |
| | | | | deleted, resulting in a truncated glnE | |
| | | | | protein lacking the adenylyl-removing | |
| | | | | (AR) domain | |
| none | 1021-1612 | SEQ ID | glnEΔAR-2 with | glnE gene with 1673bp immediately | ds1133 |
| | | NO 180 | 500bp flank | downstream of the ATG start codon | |
| | | | | deleted, resulting in a truncated glnE | |
| | | | | protein lacking the adenylyl-removing | |
| | | | | (AR) domain; 500bp flanking the glnE | |
| | | | | gene upstream and downstream are | |
| | | | | included | |
| none | 1021-1615 | SEQ ID | ΔnifL::Prm1 | starting at 24bp after the A of the ATG | ds1145 |
| | | NO 181 | | start codon, 1375bp of nifL have been | |
| | | | | deleted and replaced with the 1021 | |
| | | | | Prm1 promoter sequence | |
| none | 1021-1615 | SEQ ID | ΔnifL::Prm1 with | starting at 24bp after the A of the ATG | ds1145 |
| | | NO 182 | 500bp flank | start codon, 1375bp of nifL have been | |
| | | | | deleted and replaced with the 1021 rm1 | |
| | | | | promoter sequence; 500bp flanking the | |
| | | | | nifL gene upstream and downstream | |
| | | | | are included | |
| none | 1021-1615 | SEQ ID | glnEΔAR-2 | glnE gene with 1673bp immediately | ds1133 |
| | | NO 183 | | downstream of the ATG start codon | |
| | | | | deleted, resulting in a truncated glnE | |
| | | | | protein lacking the adenylyl-removing | |
| | | | | (AR) domain | |
| none | 1021-1615 | SEQ ID | glnEΔAR-2 with | glnE gene with 1673bp immediately | ds1133 |
| | | NO 184 | 500bp flank | downstream of the ATG start codon | |
| | | | | deleted, resulting in a truncated glnE | |
| | | | | protein lacking the adenylyl-removing | |
| | | | | (AR) domain; 500bp flanking the glnE | |
| | | | | gene upstream and downstream are | |
| | | | | included | |
| none | 1021-1619 | SEQ ID | ΔnifL::Prm1 | starting at 24bp after the A of the ATG | ds1145 |
| | | NO 185 | | start codon, 1375bp of nifL have been | |
| | | | | deleted and replaced with the 1021 | |
| | | | | Prm1 promoter sequence | |
| none | 1021-1619 | SEQ ID | ΔnifL::Prm1 with | starting at 24bp after the A of the ATG | ds1145 |
| | | NO 186 | 500bp flank | start codon, 1375bp of nifL have been | |
| | | | | deleted and replaced with the 1021 rm1 | |
| | | | | promoter sequence; 500bp flanking the | |
| | | | | nifL gene upstream and downstream | |
| | | | | are included | |
| none | 1021-1623 | SEQ ID | glnEΔAR-2 | glnE gene with 1673bp immediately | ds1133 |
| | | NO 187 | | downstream of the ATG start codon | |
| | | | | deleted, resulting in a truncated glnE | |
| | | | | protein lacking the adenylyl-removing | |
| | | | | (AR) domain | |
| none | 1021-1623 | SEQ ID | glnEΔAR-2 with | glnE gene with 1673bp immediately | ds1133 |
| | | NO 188 | 500bp flank | downstream of the ATG start codon | |
| | | | | deleted, resulting in a truncated glnE | |
| | | | | protein lacking the adenylyl-removing | |
| | | | | (AR) domain; 500bp flanking the glnE | |
| | | | | gene upstream and downstream are | |
| | | | | included | |
| none | 1021-1623 | SEQ ID | ΔnifL::Prm7 | starting at 24bp after the A of the ATG | ds1148 |
| | | NO 189 | | start codon, 1375bp of nifL have been | |
| | | | | deleted and replaced with the 1021 | |
| | | | | Prm7 promoter sequence | |
| none | 1021-1623 | SEQ ID | ΔnifL::Prm7 with | starting at 24bp after the A of the ATG | ds1148 |
| | | NO 190 | 500bp flank | start codon, 1375bp of nifL have been | |
| | | | | deleted and replaced with the 1021 rm7 | |
| | | | | promoter sequence; 500bp flanking the | |
| | | | | nifL gene upstream and downstream | |
| | | | | are included | |
| none | 137-1034 | SEQ ID | glnEΔAR-2 | glnE gene with 1290bp immediately | ds809 |
| | | NO 191 | | downstream of the ATG start codon | |
| | | | | deleted, resulting in a truncated glnE | |
| | | | | protein lacking the adenylyl-removing | |
| | | | | (AR) domain | |
| none | 137-1034 | SEQ ID | glnEΔAR-2 with | glnE gene with 1290bp immediately | ds809 |
| | | NO 192 | 500bp flank | downstream of the ATG start codon | |
| | | | | deleted, resulting in a truncated glnE | |
| | | | | protein lacking the adenylyl-removing | |
| | | | | (AR) domain; 500bp flanking the glnE | |
| | | | | gene upstream and downstream are | |
| | | | | included | |
| none | 137-1036 | SEQ ID | ΔnifL::PinfC | starting at 24bp after the A of the ATG | ds799 |
| | | NO 193 | | start codon, 1372bp of nifL have been | |
| | | | | deleted and replaced with the 137 | |
| | | | | PinfC promoter sequence | |
| none | 137-1036 | SEQ ID | ΔnifL::PinfC with | starting at 24bp after the A of the ATG | ds799 |
| | | NO 194 | 500bp flank | start codon, 1372bp of nifL have been | |
| | | | | deleted and replaced with the 137 | |
| | | | | PinfC promoter sequence; 500bp | |
| | | | | flanking the nifL gene upstream and | |
| | | | | downstream are included | |
| none | 137-1314 | SEQ ID | glnEΔAR-2 36bp | glnE gene with 1290bp immediately | none |
| | | NO 195 | deletion | downstream of the ATG start codon | |
| | | | | deleted AND 36bp deleted beginning at | |
| | | | | 1472bp downstream of the start codon, | |
| | | | | resulting in a truncated glnE protein | |
| | | | | lacking the adenylyl-removing (AR) | |
| | | | | domain | |
| none | 137-1314 | SEQ ID | glnEΔAR-2 36bp | glnE gene with 1290bp immediately | none |
| | | NO 196 | deletion | downstream of the ATG start codon | |
| | | | | deleted AND 36bp deleted beginning at | |
| | | | | 1472bp downstream of the start codon, | |
| | | | | resulting in a truncated glnE protein | |
| | | | | lacking the adenylyl-removing (AR) | |
| | | | | domain; 500bp flanking the nifL gene | |
| | | | | upstream and downstream are included | |
| none | 137-1314 | SEQ ID | ΔnifL::Prm8.2 | starting at 24bp after the A of the ATG | ds857 |
| | | NO 197 | | start codon, 1372bp of nifL have been | |
| | | | | deleted and replaced with the 137 | |
| | | | | Prm8.2 promoter sequence | |
| none | 137-1314 | SEQ ID | ΔnifL::Prm8.2 with | starting at 24bp after the A of the ATG | ds857 |
| | | NO 198 | 500bp flank | start codon, 1372bp of nifL have been | |
| | | | | deleted and replaced with the 137 | |
| | | | | Prm8.2 promoter sequence; 500bp | |
| | | | | flanking the nifL gene upstream and | |
| | | | | downstream are included | |
| none | 137-1329 | SEQ ID | glnEΔAR-2 36bp | glnE gene with 1290bp immediately | none |
| | | NO 199 | deletion | downstream of the ATG start codon | |
| | | | | deleted AND 36bp deleted beginning at | |
| | | | | 1472bp downstream of the start codon, | |
| | | | | resulting in a truncated glnE protein | |
| | | | | lacking the adenylyl-removing (AR) | |
| | | | | domain | |
| none | 137-1329 | SEQ ID | glnEΔAR-2 36bp | glnE gene with 1290bp immediately | none |
| | | NO 200 | deletion | downstream of the ATG start codon | |
| | | | | deleted AND 36bp deleted beginning at | |
| | | | | 1472bp downstream of the start codon, | |
| | | | | resulting in a truncated glnE protein | |
| | | | | lacking the adenylyl-removing (AR) | |
| | | | | domain; 500bp flanking the nifL gene | |
| | | | | upstream and downstream are included | |
| none | 137-1329 | SEQ ID | ΔnifL::Prm6.2 | starting at 24bp after the A of the ATG | ds853 |
| | | NO 201 | | start codon, 1372bp of nifL have been | |
| | | | | deleted and replaced with the 137 | |
| | | | | Prm6.2 promoter sequence | |
| none | 137-1329 | SEQ ID | ΔnifL::Prm6.2 with | starting at 24bp after the A of the ATG | ds853 |
| | | NO 202 | 500bp flank | start codon, 1372bp of nifL have been | |
| | | | | deleted and replaced with the 137 | |
| | | | | Prm6.2 promoter sequence; 500bp | |
| | | | | flanking the nifL gene upstream and | |
| | | | | downstream are included | |
| none | 137-1382 | SEQ ID | ΔnifL::Prm1.2 | starting at 24bp after the A of the ATG | ds843 |
| | | NO 203 | | start codon, 1372bp of nifL have been | |
| | | | | deleted and replaced with the 137 | |
| | | | | Prm1.2 promoter sequence | |
| none | 137-1382 | SEQ ID | ΔnifL::Prm1.2 with | starting at 24bp after the A of the ATG | ds843 |
| | | NO 204 | 500bp flank | start codon, 1372bp of nifL have been | |
| | | | | deleted and replaced with the 137 | |
| | | | | Prm1.2 promoter sequence; 500bp | |
| | | | | flanking the nifL gene upstream and | |
| | | | | downstream are included | |
| none | 137-1382 | SEQ ID | glnEΔAR-2 36bp | glnE gene with 1290bp immediately | none |
| | | NO 205 | deletion | downstream of the ATG start codon | |
| | | | | deleted AND 36bp deleted beginning at | |
| | | | | 1472bp downstream of the start codon, | |
| | | | | resulting in a truncated glnE protein | |
| | | | | lacking the adenylyl-removing (AR) | |
| | | | | domain | |
| none | 137-1382 | SEQ ID | glnEΔAR-2 36bp | glnE gene with 1290bp immediately | none |
| | | NO 206 | deletion | downstream of the ATG start codon | |
| | | | | deleted AND 36bp deleted beginning at | |
| | | | | 1472bp downstream of the start codon, | |
| | | | | resulting in a truncated glnE protein | |
| | | | | lacking the adenylyl-removing (AR) | |
| | | | | domain; 500bp flanking the nifL gene | |
| | | | | upstream and downstream are included | |
| none | 137-1586 | SEQ ID | ΔnifL::PinfC | starting at 24bp after the A of the ATG | ds799 |
| | | NO 207 | | start codon, 1372bp of nifL have been | |
| | | | | deleted and replaced with the 137 | |
| | | | | PinfC promoter sequence | |
| none | 137-1586 | SEQ ID | ΔnifL::PinfC with | starting at 24bp after the A of the ATG | ds799 |
| | | NO 208 | 500bp flank | start codon, 1372bp of nifL have been | |
| | | | | deleted and replaced with the 137 | |
| | | | | PinfC promoter sequence; 500bp | |
| | | | | flanking the nifL gene upstream and | |
| | | | | downstream are included | |
| none | 137-1586 | SEQ ID | glnEΔAR-2 | glnE gene with 1290bp immediately | ds809 |
| | | NO 209 | | downstream of the ATG start codon | |
| | | | | deleted, resulting in a truncated glnE | |
| | | | | protein lacking the adenylyl-removing | |
| | | | | (AR) domain | |
| none | 137-1586 | SEQ ID | glnEΔAR-2 with | glnE gene with 1290bp immediately | ds809 |
| | | NO 210 | 500bp flank | downstream of the ATG start codon | |
| | | | | deleted, resulting in a truncated glnE | |
| | | | | protein lacking the adenylyl-removing | |
| | | | | (AR) domain; 500bp flanking the glnE | |
| | | | | gene upstream and downstream are | |
| | | | | included | |
| none | 19-594 | SEQ ID | glnEΔAR-2 | glnE gene with 1650bp immediately | ds34 |
| | | NO 211 | | downstream of the ATG start codon | |
| | | | | deleted, resulting in a truncated glnE | |
| | | | | protein lacking the adenylyl-removing | |
| | | | | (AR) domain | |
| none | 19-594 | SEQ ID | glnEΔAR-2 with | glnE gene with 1650bp immediately | ds34 |
| | | NO 212 | 500bp flank | downstream of the ATG start codon | |
| | | | | deleted, resulting in a truncated glnE | |
| | | | | protein lacking the adenylyl-removing | |
| | | | | (AR) domain; 500bp flanking the glnE | |
| | | | | gene upstream and downstream are | |
| | | | | included | |
| none | 19-594 | SEQ ID | ΔnifL::Prm6.1 | starting at 221bp after the A of the | ds180 |
| | | NO 213 | | ATG start codon, 845bp of nifL have | |
| | | | | been deleted and replaced with the | |
| | | | | CI019 Prm6.1 promoter sequence | |
| none | 19-594 | SEQ ID | ΔnifL::Prm6.1 with | starting at 221bp after the A of the | ds180 |
| | | NO 214 | 500bp flank | ATG start codon, 845bp of nifL have | |
| | | | | been deleted and replaced with the | |
| | | | | CI019 Prm6.1promoter sequence; | |
| | | | | 500bp flanking the nifL gene upstream | |
| | | | | and downstream are included | |
| none | 19-714 | SEQ ID | ΔnifL::Prm6.1 | starting at 221bp after the A of the | ds180 |
| | | NO 215 | | ATG start codon, 845bp of nifL have | |
| | | | | been deleted and replaced with the | |
| | | | | CI019 Prm6.1 promoter sequence | |
| none | 19-714 | SEQ ID | ΔnifL::Prm6.1 with | starting at 221bp after the A of the | ds180 |
| | | NO 216 | 500bp flank | ATG start codon, 845bp of nifL have | |
| | | | | been deleted and replaced with the | |
| | | | | CI019 Prm6.1promoter sequence; | |
| | | | | 500bp flanking the nifL gene upstream | |
| | | | | and downstream are included | |
| none | 19-715 | SEQ ID | ΔnifL::Prm7.1 | starting at 221bp after the A of the | ds181 |
| | | NO 217 | | ATG start codon, 845bp of nifL have | |
| | | | | been deleted and replaced with the | |
| | | | | CI019 Prm7.1 promoter sequence | |
| none | 19-715 | SEQ ID | ΔnifL::Prm7.1 with | starting at 221bp after the A of the | ds181 |
| | | NO 218 | 500bp flank | ATG start codon, 845bp of nifL have | |
| | | | | been deleted and replaced with the | |
| | | | | CI019 Prm76.1promoter sequence; | |
| | | | | 500bp flanking the nifL gene upstream | |
| | | | | and downstream are included | |
| 19-713 | 19-750 | SEQ ID | ΔnifL::Prm1.2 | starting at 221bp after the A of the | ds172 |
| | | NO 219 | | ATG start codon, 845bp of nifL have | |
| | | | | been deleted and replaced with the | |
| | | | | CI019 Prm1.2 promoter sequence | |
| 19-713 | 19-750 | SEQ ID | ΔnifL::Prm1.2 with | starting at 221bp after the A of the | ds172 |
| | | NO 220 | 500bp flank | ATG start codon, 845bp of nifL have | |
| | | | | been deleted and replaced with the | |
| | | | | CI019 Prm1.2 promoter sequence; | |
| | | | | 500bp flanking the nifL gene upstream | |
| | | | | and downstream are included | |
| 17-724 | 19-804 | SEQ ID | ΔnifL::Prm1.2 | starting at 221bp after the A of the | ds172 |
| | | NO 221 | | ATG start codon, 845bp of nifL have | |
| | | | | been deleted and replaced with the | |
| | | | | CI019 Prm1.2 promoter sequence | |
| 17-724 | 19-804 | SEQ ID | ΔnifL::Prm1.2 with | starting at 221bp after the A of the | ds172 |
| | | NO 222 | 500bp flank | ATG start codon, 845bp of nifL have | |
| | | | | been deleted and replaced with the | |
| | | | | CI019 Prm1.2 promoter sequence; | |
| | | | | 500bp flanking the nifL gene upstream | |
| | | | | and downstream are included | |
| 17-724 | 19-804 | SEQ ID | glnEΔAR-2 | glnE gene with 1650bp immediately | ds34 |
| | | NO 223 | | downstream of the ATG start codon | |
| | | | | deleted, resulting in a truncated glnE | |
| | | | | protein lacking the adenylyl-removing | |
| | | | | (AR) domain | |
| 17-724 | 19-804 | SEQ ID | glnEΔAR-2 with | glnE gene with 1650bp immediately | ds34 |
| | | NO 224 | 500bp flank | downstream of the ATG start codon | |
| | | | | deleted, resulting in a truncated glnE | |
| | | | | protein lacking the adenylyl-removing | |
| | | | | (AR) domain; 500bp flanking the glnE | |
| | | | | gene upstream and downstream are | |
| | | | | included | |
| 19-590 | 19-806 | SEQ ID | ΔnifL::Prm3.1 | starting at 221bp after the A of the | ds175 |
| | | NO 225 | | ATG start codon, 845bp of nifL have | |
| | | | | been deleted and replaced with the | |
| | | | | CI019 Prm3.1 promoter sequence | |
| 19-590 | 19-806 | SEQ ID | ΔnifL::Prm3.1 with | starting at 221bp after the A of the | ds175 |
| | | NO 226 | 500bp flank | ATG start codon, 845bp of nifL have | |
| | | | | been deleted and replaced with the | |
| | | | | CI019 Prm3.1 promoter sequence; | |
| | | | | 500bp flanking the nifL gene upstream | |
| | | | | and downstream are included | |
| 19-590 | 19-806 | SEQ ID | glnEΔAR-2 | glnE gene with 1650bp immediately | ds34 |
| | | NO 227 | | downstream of the ATG start codon | |
| | | | | deleted, resulting in a truncated glnE | |
| | | | | protein lacking the adenylyl-removing | |
| | | | | (AR) domain | |
| 19-590 | 19-806 | SEQ ID | glnEΔAR-2 with | glnE gene with 1650bp immediately | ds34 |
| | | NO 228 | 500bp flank | downstream of the ATG start codon | |
| | | | | deleted, resulting in a truncated glnE | |
| | | | | protein lacking the adenylyl-removing | |
| | | | | (AR) domain; 500bp flanking the glnE | |
| | | | | gene upstream and downstream are | |
| | | | | included | |
| none | 63-1146 | SEQ ID | ΔnifL::PinfC | starting at 24bp after the A of the ATG | ds908 |
| | | NO 229 | | start codon, 1375bp of nifL have been | |
| | | | | deleted and replaced with the 63 PinfC | |
| | | | | promoter sequence | |
| none | 63-1146 | SEQ ID | ΔnifL::PinfC with | starting at 24bp after the A of the ATG | ds908 |
| | | NO 230 | 500bp flank | start codon, 1375bp of nifL have been | |
| | | | | deleted and replaced with the 63 PinfC | |
| | | | | promoter sequence; 500bp flanking the | |
| | | | | nifL gene upstream and downstream | |
| | | | | are included | |
| CM015; | 6-397 | SEQ ID | ΔnifL::Prm5 | starting at 31bp after the A of the ATG | ds24 |
| PBC6.15 | | NO 231 | | start codon, 1375bp of nifL have been | |
| | | | | deleted and replaced with the CI006 | |
| | | | | Prm5 promoter sequence | |
| CM015; | 6-397 | SEQ ID | ΔnifL::Prm5 with | starting at 31bp after the A of the ATG | ds24 |
| PBC6.15 | | NO 232 | 500bp flank | start codon, 1375bp of nifL have been | |
| | | | | deleted and replaced with the CI006 | |
| | | | | Prm5 promoter sequence; 500bp | |
| | | | | flanking the nifL gene upstream and | |
| | | | | downstream are included | |
| CM014 | 6-400 | SEQ ID | ΔnifL::Prm1 | starting at 31bp after the A of the ATG | ds20 |
| | | NO 233 | | start codon, 1375bp of nifL have been | |
| | | | | deleted and replaced with the CI006 | |
| | | | | Prm1 promoter sequence | |
| CM014 | 6-400 | SEQ ID | ΔnifL::Prm1 with | starting at 31bp after the A of the ATG | ds20 |
| | | NO 234 | 500bp flank | start codon, 1375bp of nifL have been | |
| | | | | deleted and replaced with the CI006 | |
| | | | | Prm1 promoter sequence; 500bp | |
| | | | | flanking the nifL gene upstream and | |
| | | | | downstream are included | |
| CM037; | 6-403 | SEQ ID | ΔnifL::Prm1 | starting at 31bp after the A of the ATG | ds20 |
| PBC6.37 | | NO 235 | | start codon, 1375bp of nifL have been | |
| | | | | deleted and replaced with the CI006 | |
| | | | | Prm1 promoter sequence | |
| CM037; | 6-403 | SEQ ID | ΔnifL::Prm1 with | starting at 31bp after the A of the ATG | ds20 |
| PBC6.38 | | NO 236 | 500bp flank | start codon, 1375bp of nifL have been | |
| | | | | deleted and replaced with the CI006 | |
| | | | | Prm1 promoter sequence; 500bp | |
| | | | | flanking the nifL gene upstream and | |
| | | | | downstream are included | |
| CM037; | 6-403 | SEQ ID | glnEΔAR-2 | glnE gene with 1644bp immediately | ds31 |
| PBC6.39 | | NO 237 | | downstream of the ATG start codon | |
| | | | | deleted, resulting in a truncated glnE | |
| | | | | protein lacking the adenylyl-removing | |
| | | | | (AR) domain | |
| CM037; | 6-403 | SEQ ID | glnEΔAR-2 with | glnE gene with 1644bp immediately | ds31 |
| PBC6.40 | | NO 238 | 500bp flank | downstream of the ATG start codon | |
| | | | | deleted, resulting in a truncated glnE | |
| | | | | protein lacking the adenylyl-removing | |
| | | | | (AR) domain; 500bp flanking the glnE | |
| | | | | gene upstream and downstream are | |
| | | | | included | |
| CM038; | 6-404 | SEQ ID | glnEΔAR-1 | glnE gene with 1287bp immediately | ds30 |
| PBC6.38 | | NO 239 | | downstream of the ATG start codon | |
| | | | | deleted, resulting in a truncated glnE | |
| | | | | protein lacking the adenylyl-removing | |
| | | | | (AR) domain | |
| CM038; | 6-404 | SEQ ID | ΔnifL::Prm1 | starting at 31bp after the A of the ATG | ds20 |
| PBC6.38 | | NO 240 | | start codon, 1375bp of nifL have been | |
| | | | | deleted and replaced with the CI006 | |
| | | | | Prm1 promoter sequence | |
| CM038; | 6-404 | SEQ ID | ΔnifL::Prm1 with | starting at 31bp after the A of the ATG | ds20 |
| PBC6.38 | | NO 241 | 500bp flank | start codon, 1375bp of nifL have been | |
| | | | | deleted and replaced with the CI006 | |
| | | | | Prm1 promoter sequence; 500bp | |
| | | | | flanking the nifL gene upstream and | |
| | | | | downstream are included | |
| CM038; | 6-404 | SEQ ID | glnEΔAR-1 with | glnE gene with 1287bp immediately | ds30 |
| PBC6.38 | | NO 242 | 500bp flank | downstream of the ATG start codon | |
| | | | | deleted, resulting in a truncated glnE | |
| | | | | protein lacking the adenylyl-removing | |
| | | | | (AR) domain; 500bp flanking the glnE | |
| | | | | gene upstream and downstream are | |
| | | | | included | |
| CM029; | 6-412 | SEQ ID | glnEΔAR-1 | glnE gene with 1287bp immediately | ds30 |
| PBC6.29 | | NO 243 | | downstream of the ATG start codon | |
| | | | | deleted, resulting in a truncated glnE | |
| | | | | protein lacking the adenylyl-removing | |
| | | | | (AR) domain | |
| CM029; | 6-412 | SEQ ID | glnEΔAR-1 with | glnE gene with 1287bp immediately | ds30 |
| PBC6.29 | | NO 244 | 500bp flank | downstream of the ATG start codon | |
| | | | | deleted, resulting in a truncated glnE | |
| | | | | protein lacking the adenylyl-removing | |
| | | | | (AR) domain; 500bp flanking the glnE | |
| | | | | gene upstream and downstream are | |
| | | | | included | |
| CM029; | 6-412 | SEQ ID | ΔnifL::Prm5 | starting at 31bp after the A of the ATG | ds24 |
| PBC6.29 | | NO 245 | | start codon, 1375bp of nifL have been | |
| | | | | deleted and replaced with the CI006 | |
| | | | | Prm5 promoter sequence | |
| CM029; | 6-412 | SEQ ID | ΔnifL::Prm5 with | starting at 31bp after the A of the ATG | ds24 |
| PBC6.29 | | NO 246 | 500bp flank | start codon, 1375bp of nifL have been | |
| | | | | deleted and replaced with the CI006 | |
| | | | | Prm5 promoter sequence; 500bp | |
| | | | | flanking the nifL gene upstream and | |
| | | | | downstream are included | |
| CM093; | 6-848 | SEQ ID | ΔnifL::Prm1 | starting at 31bp after the A of the ATG | ds20 |
| PBC6.93 | | NO 247 | | start codon, 1375bp of nifL have been | |
| | | | | deleted and replaced with the CI006 | |
| | | | | Prm1 promoter sequence | |
| CM093; | 6-848 | SEQ ID | ΔnifL::Prm1 with | starting at 31bp after the A of the ATG | ds20 |
| PBC6.93 | | NO 248 | 500bp flank | start codon, 1375bp of nifL have been | |
| | | | | deleted and replaced with the CI006 | |
| | | | | Prm1 promoter sequence; 500bp | |
| | | | | flanking the nifL gene upstream and | |
| | | | | downstream are included | |
| CM093; | 6-848 | SEQ ID | glnEΔAR-2 | glnE gene with 1644bp immediately | ds31 |
| PBC6.93 | | NO 249 | | downstream of the ATG start codon | |
| | | | | deleted, resulting in a truncated glnE | |
| | | | | protein lacking the adenylyl-removing | |
| | | | | (AR) domain | |
| CM093; | 6-848 | SEQ ID | glnEΔAR-2 with | glnE gene with 1644bp immediately | ds31 |
| PBC6.93 | | NO 250 | 500bp flank | downstream of the ATG start codon | |
| | | | | deleted, resulting in a truncated glnE | |
| | | | | protein lacking the adenylyl-removing | |
| | | | | (AR) domain; 500bp flanking the glnE | |
| | | | | gene upstream and downstream are | |
| | | | | included | |
| CM093; | 6-848 | SEQ ID | ΔamtB | First 1088bp of amtB gene and 4bp | ds126 |
| PBC6.93 | | NO 251 | | upstream of start codon deleted; 199bp | |
| | | | | of gene remaining lacks a start codon; | |
| | | | | no amtB protein is translated | |
| CM093; | 6-848 | SEQ ID | ΔamtB with 500bp | First 1088bp of amtB gene and 4bp | ds126 |
| PBC6.93 | | NO 252 | flank | upstream of start codon deleted; 199bp | |
| | | | | of gene remaining lacks a start codon; | |
| | | | | no amtB protein is translated | |
| CM094: | 6-881 | SEQ ID | glnEΔAR-1 | glnE gene with 1287bp immediately | ds30 |
| PBC6.94 | | NO 253 | | downstream of the ATG start codon | |
| | | | | deleted, resulting in a truncated glnE | |
| | | | | protein lacking the adenylyl-removing | |
| | | | | (AR) domain | |
| CM094; | 6-881 | SEQ ID | glnEΔAR-1 with | glnE gene with 1287bp immediately | ds30 |
| PBC6.94 | | NO 254 | 500bp flank | downstream of the ATG start codon | |
| | | | | deleted, resulting in a truncated glnE | |
| | | | | protein lacking the adenylyl-removing | |
| | | | | (AR) domain; 500bp flanking the glnE | |
| | | | | gene upstream and downstream are | |
| | | | | included | |
| CM094; | 6-881 | SEQ ID | ΔnifL::Prm1 | starting at 31bp after the A of the ATG | ds20 |
| PBC6.94 | | NO 255 | | start codon, 1375bp of nifL have been | |
| | | | | deleted and replaced with the CI006 | |
| | | | | Prm1 promoter sequence | |
| CM094; | 6-881 | SEQ ID | ΔnifL::Prm1 with | starting at 31bp after the A of the ATG | ds20 |
| PBC6.94 | | NO 256 | 500bp flank | start codon, 1375bp of nifL have been | |
| | | | | deleted and replaced with the CI006 | |
| | | | | Prm1 promoter sequence; 500bp | |
| | | | | flanking the nifL gene upstream and | |
| | | | | downstream are included | |
| CM094; | 6-881 | SEQ ID | ΔamtB | First 1088bp of amtB gene and 4bp | ds126 |
| PBC6.94 | | NO 257 | | upstream of start codon deleted; 199bp | |
| | | | | of gene remaining lacks a start codon; | |
| | | | | no amtB protein is translated | |
| CM094; | 6-881 | SEQ ID | ΔamtB with 500bp | First 1088bp of amtB gene and 4bp | ds126 |
| PBC6.94 | | NO 258 | flank | upstream of start codon deleted; 199bp | |
| | | | | of gene remaining lacks a start codon; | |
| | | | | no amtB protein is translated | |
| none | 910-1246 | SEQ ID | ΔnifL::PinfC | starting at 20bp after the A of the ATG | ds960 |
| | | NO 259 | | start codon, 1379bp of nifL have been | |
| | | | | deleted and replaced with the 910 | |
| | | | | PinfC promoter sequence | |
| none | 910-1246 | SEQ ID | ΔnifL::PinfC with | starting at 20bp after the A of the ATG | ds960 |
| | | NO 260 | 500bp flank | start codon, 1379bp of nifL have been | |
| | | | | deleted and replaced with the 910 | |
| | | | | PinfC promoter sequence; 500bp | |
| | | | | flanking the nifL gene upstream and | |
| | | | | downstream are included | |
| PBC6.1, | CI006 | SEQ ID | 16S-1 | 1 of 3 unique 16S rDNA genes in the | N/A |
| 6, CI6 | | NO 261 | | CI006 genome | |
| PBC6.1, | CI006 | SEQ ID | 16S-2 | 2 of 3 unique 16S rDNA genes in the | N/A |
| 6. CI6 | | NO 262 | | CI006 genome | |
| PBC6.1. | CI006 | SEQ ID | nifH | N/A | N/A |
| 6, CI6 | | NO 263 | | | |
| PBC6.1, | CI006 | SEQ ID | nifD2 | 2 of 2 unique genes annotated as nifD | N/A |
| 6, CI6 | | NO 264 | | in CI006 genome | |
| PBC6.1, | CI006 | SEQ ID | nifK2 | 2 of 2 unique genes annotated as nifK | N/A |
| 6. CI6 | | NO 265 | | in CI006 genome | |
| PBC6.1, | CI006 | SEQ ID | nifL | N/A | N/A |
| 6,06 | | NO 266 | | | |
| PBC6.1. | CI006 | SEQ ID | nifA | N/A | N/A |
| 6, CI6 | | NO 267 | | | |
| PBC6.1, | CI006 | SEQ ID | glnE | N/A | N/A |
| 6, CI6 | | NO 268 | | | |
| PBC6.1, | CI006 | SEQ ID | 16S-3 | 3 of 3 unique 16S rDNA genes in the | N/A |
| 6,06 | | NO 269 | | CI006 genome | |
| PBC6.1, | CI006 | SEQ ID | nifD1 | 1 of 2 unique genes annotated as nifD | N/A |
| 6, CI6 | | NO 270 | | in CI006 genome | |
| PBC6.1. | CI006 | SEQ ID | nifK1 | 1 of 2 unique genes annotated as nifK | N/A |
| 6, CI6 | | NO 271 | | in CI006 genome | |
| PBC6.1, | CI006 | SEQ ID | amtB | N/A | N/A |
| 6, CI6 | | NO 272 | | | |
| PBC6.1, | CI006 | SEQ ID | Prm1 | 348bp includes the 319bp immediately | N/A |
| 6, CI6 | | NO 273 | | upstream of the ATG start codon of the | |
| | | | | lpp gene and the first 29bp of the lpp | |
| | | | | gene | |
| PBC6.1, | CI006 | SEQ ID | Prm5 | 313bp starting at 432bp upstream of the | N/A |
| 6, CI6 | | NO 274 | | ATG start codon of the ompX gene and | |
| | | | | ending 119bp upstream of the ATG | |
| | | | | start codon of the ompX gene | |
| 19, CI19 | CI019 | SEQ ID | nifL | N/A | N/A |
| | | NO 275 | | | |
| 19, CI19 | CI019 | SEQ ID | nifA | N/A | N/A |
| | | NO 276 | | | |
| 19, CI19 | CI019 | SEQ ID | 16S-1 | 1 of 7 unique 16S rDNA genes in the | N/A |
| | | NO 277 | | CI019 genome | |
| 19, CI19 | CI019 | SEQ ID | 16S-2 | 2 of 7 unique 16S rDNA genes in the | N/A |
| | | NO 278 | | CI019 genome | |
| 19, CI19 | CI019 | SEQ ID | 16S-3 | 3 of 7 unique 16S rDNA genes in the | N/A |
| | | NO 279 | | CI019 genome | |
| 19, CI19 | CI019 | SEQ ID | 16S-4 | 4 of 7 unique 16S rDNA genes in the | N/A |
| | | NO 280 | | CI019 genome | |
| 19, CI19 | CI019 | SEQ ID | 16S-5 | 5 of 7 unique 16S rDNA genes in the | N/A |
| | | NO 281 | | CI019 genome | |
| 19, CI19 | CI019 | SEQ ID | 16S-6 | 6 of 7 unique 16S rDNA genes in the | N/A |
| | | NO 282 | | CI019 genome | |
| 19, CI19 | CI019 | SEQ ID | 16S-7 | 7 of 7 unique 16S rDNA genes in the | N/A |
| | | NO 283 | | CI019 genome | |
| 19, CI19 | CI019 | SEQ ID | nifH1 | 1 of 2 unique genes annotated as nifH | N/A |
| | | NO 284 | | in CI019 genome | |
| 19, CI19 | CI019 | SEQ ID | nifH2 | 2 of 2 unique genes annotated as nifH | N/A |
| | | NO 285 | | in CI019 genome | |
| 19, CI19 | CI019 | SEQ ID | nifD1 | 1 of 2 unique genes annotated as nifD | N/A |
| | | NO 286 | | in CI019 genome | |
| 19, CI19 | CI019 | SEQ ID | nifD2 | 2 of 2 unique genes annotated as nifD | N/A |
| | | NO 287 | | in CI019 genome | |
| 19, CI19 | CI019 | SEQ ID | nifK1 | 1 of 2 unique genes annotated as nifK | N/A |
| | | NO 288 | | in CI019 genome | |
| 19, CI19 | CI019 | SEQ ID | nifK2 | 2 of 2 unique genes annotated as nifK | N/A |
| | | NO 289 | | in CI019 genome | |
| 19, CI19 | CI019 | SEQ ID | glnE | N/A | N/A |
| | | NO 290 | | | |
| 19, CI19 | CI019 | SEQ ID | Prm4 | 449bp immediately upstream of the | N/A |
| | | NO 291 | | ATG of the dscC 2 gene | |
| 19, CI19 | CI019 | SEQ ID | Prm1.2 | 500bp immediately upstream of the | N/A |
| | | NO 292 | | TTG start codon of the infC gene | |
| 19, CI19 | CI019 | SEQ ID | Prm3.1 | 170 bp immediately upstream of the | N/A |
| | | NO 293 | | ATG start codon of the rplN gene | |
| 19, CI20 | CI020 | SEQ ID | Prm6.1 | 142bp immediately upstream of the | N/A |
| | | NO 294 | | ATG of a highly-expressed | |
| | | | | hypothetical protein (annotated as | |
| | | | | PROKKA_00662 in CI019 assembly | |
| | | | | 82) | |
| 19, CI21 | CI021 | SEQ ID | Prm7.1 | 293bp immediately upstream of the | N/A |
| | | NO 295 | | ATG of the lpp gene | |
| 19-375, | CM67 | SEQ ID | glnEΔAR-2 | glnE gene with 1650bp immediately | ds34 |
| 19-417, | | NO 296 | | downstream of the ATG start codon | |
| CM067 | | | | deleted, resulting in a truncated glnE | |
| | | | | protein lacking the adenylyl-removing | |
| | | | | (AR) domain | |
| 19-375, | CM67 | SEQ ID | glnEΔAR-2 with | glnE gene with 1650bp immediately | ds34 |
| 19-417, | | NO 297 | 500bp flank | downstream of the ATG start codon | |
| CM067 | | | | deleted, resulting in a truncated glnE | |
| | | | | protein lacking the adenylyl-removing | |
| | | | | (AR) domain; 500bp flanking the glnE | |
| | | | | gene upstream and downstream are | |
| | | | | included | |
| 19-375, | CM67 | SEQ ID | ΔnifL::null-v1 | starting at 221bp after the A of the | none |
| 19-417, | | NO 298 | | ATG start codon, 845bp of nifL have | |
| CM067 | | | | been deleted and replaced with the | |
| | | | | 31bp sequence | |
| | | | | “GGAGTCTGAACTCATCCTGCGATGGGGGCTG” | |
| 19-375, | CM67 | SEQ ID | ΔnifL::null-v1 with | starting at 221bp after the A of the | none |
| 19-417, | | NO 299 | 500bp flank | ATG start codon, 845bp of nifL have | |
| CM067 | | | | been deleted and replaced with the | |
| | | | | 31bp sequence | |
| | | | | “GGAGTCTGAACTCATCCTGCGATGGGGGCTG”; | |
| | | | | 500bp flanking the | |
| | | | | nifL gene upstream and downstream | |
| | | | | are included | |
| 19-377, | CM69 | SEQ ID | ΔnifL::null-v2 | starting at 221bp after the A of the | none |
| CM069 | | NO 300 | | ATG start codon, 845bp of nifL have | |
| | | | | been deleted and replaced with the 5bp | |
| | | | | sequence “TTAAA” | |
| 19-377, | CM69 | SEQ ID | ΔnifL::null-v2 with | starting at 221bp after the A of the | none |
| CM069 | | NO 301 | 500bp flank | ATG start codon, 845bp of nifL have | |
| | | | | been deleted and replaced with the 5bp | |
| | | | | sequence “TTAAA”; 500bp flanking | |
| | | | | the nifL gene upstream and | |
| | | | | downstream are included | |
| 19-389, | CM81 | SEQ ID | ΔnifL::Prm4 | starting at 221bp after the A of the | ds70 |
| 19-418, | | NO 302 | | ATG start codon, 845bp of nifL have | |
| CM081 | | | | been deleted and replaced with the | |
| | | | | CI19 Prm4 sequence | |
| 19-389, | CM81 | SEQ ID | ΔnifL::Prm4 with | starting at 221bp after the A of the | ds70 |
| 19-418, | | NO 303 | 500bp flank | ATG start codon, 845bp of nifL have | |
| CM081 | | | | been deleted and replaced with the | |
| | | | | CI19 Prm4 sequence; 500bp flanking | |
| | | | | the nifL gene upstream and | |
| | | | | downstream are included | |
| | 137-2084 | SEQ ID | glnE_KO2 | glnE gene with 1290bp immediately | ds809 |
| | | NO 191 | | downstream of the ATG start codon | |
| | | | | deleted, resulting in a truncated glnE | |
| | | | | protein lacking the adenylyl-removing | |
| | | | | (AR) domain | |
| | 137-2084 | SEQ ID | glnE_KO2 with | glnE gene with 1290bp immediately | ds809 |
| | | NO 192 | 500bp flank | downstream of the ATG start codon | |
| | | | | deleted, resulting in a truncated glnE | |
| | | | | protein lacking the adenylyl-removing | |
| | | | | (AR) domain; 500bp flanking the glnE | |
| | | | | gene upstream and downstream are | |
| | | | | included | |
| | 137-2084 | SEQ ID | ΔnifL-Prm1.2 | starting at 24bp after the A of the ATG | ds843 |
| | | NO 203 | | start codon, 1372bp of nifL have been | |
| | | | | deleted and replaced with the 137 | |
| | | | | Prm1.2 promoter sequence | |
| | 137-2084 | SEQ ID | ΔnifL-Prm1.2 with | starting at 24bp after the A of the ATG | ds843 |
| | | NO 204 | 500bp flank | start codon, 1372bp of nifL have been | |
| | | | | deleted and replaced with the 137 | |
| | | | | Prm1.2 promoter sequence; 500bp | |
| | | | | flanking the nifL gene upstream and | |
| | | | | downstream are included | |
| | 137-2237 | SEQ ID | glnE_KO2 | glnE gene with 1290bp immediately | ds809 |
| | | NO 191 | | downstream of the ATG start codon | |
| | | | | deleted, resulting in a truncated glnE | |
| | | | | protein lacking the adenylyl-removing | |
| | | | | (AR) domain | |
| | 137-2237 | SEQ ID | glnE_KO2 with | glnE gene with 1290bp immediately | ds809 |
| | | NO 192 | 500bp flank | downstream of the ATG start codon | |
| | | | | deleted, resulting in a truncated glnE | |
| | | | | protein lacking the adenylyl-removing | |
| | | | | (AR) domain; 500bp flanking the glnE | |
| | | | | gene upstream and downstream are | |
| | | | | included | |
| | 137-2237 | SEQ ID | ΔnifL-Prm1.2 | starting at 24bp after the A of the ATG | ds843 |
| | | NO 203 | | start codon, 1372bp of nifL have been | |
| | | | | deleted and replaced with the 137 | |
| | | | | Prm1.2 promoter sequence | |
| | 137-2237 | SEQ ID | ΔnifL-Prm1.2 with | starting at 24bp after the A of the ATG | ds843 |
| | | NO 204 | 500bp flank | start codon, 1372bp of nifL have been | |
| | | | | deleted and replaced with the 137 | |
| | | | | Prm1.2 promoter sequence; 500bp | |
| | | | | flanking the nifL gene upstream and | |
| | | | | downstream are included | |
| | 137-2237 | SEQ ID | glsA2::Prm1.2_AT | 81bp immediately upstream of the | ds2551 |
| | | NO 431 | G-start | ATG start codon were deleted and | |
| | | | | replaced with the 137 Prm1.2 promoter | |
| | | | | sequence | |
| | 137-2237 | SEQ ID | glsA2::Prm1.2_AT | 81bp immediately upstream of the | ds2551 |
| | | NO 432 | G-start with 500bp | ATG start codon were deleted and | |
| | | | flank | replaced with the 137 Prm1.2 promoter | |
| | | | | sequence; 500bp flanking the Prm1.2 | |
| | | | | promoter and glsA2 gene upstream and | |
| | | | | downstream are included | |

### Example 7: Guided Microbial Remodeling Campaign for the Rational Improvement of Multiple Phenotypic Traits

[0663] In this example, Steps A-F described in Example 1 were used to generate several non-transgenic derivative strains of Klebsiella variicola Wild type (WT) strain, CI137. First, the WT strain, CI137, was isolated from a rhizosphere, characterized, and domesticated using the approaches described in steps A-C of Example 1.

[0664] Then using the approaches described in steps D-F of Example 1, multiple phenotypic traits of CI137 were rationally improved without the use of transgenes. For example, to test whether the nitrogen fixation trait of the WT strain can be improved, various genes involved in nitrogen fixation as described throughout this application were targeted to engineer non-intergeneric mutations, the engineered/remodeled microbes were analyzed for nitrogen fixation, and the engineering and the analytics steps were iterated to test whether further improvements can be made in the nitrogen fixation ability. Once substantial improvement in the nitrogen fixation ability was achieved for a remodeled strain of CI137, the microbes were assessed for the colonization trait. As the remodeled strains with improved nitrogen fixation showed lower colonization than the WT strain, genes involved in colonization as described in this application were targeted to engineer non-intergeneric mutations to improve colonization, the engineered/remodeled microbes were analyzed for colonization, and the engineering and the analytics steps were iterated.

[0665] To generate non-intergeneric mutations through the iterative remodeling process, two approaches were employed to remodel the underlying genetic architecture of the microbe: (1) creating markerless deletions of genomic sequences encoding protein domains or whole genes, and (2) rewiring regulatory networks by intragenomic promoter rearrangement.

[0666] The remodeled strains of CI137 obtained through this iterative remodeling process that showed improvement in nitrogen fixation and/or colonization are described below.

[0667] To test whether the nitrogen fixation trait of the WT strain, CI137, can be improved, a 1647 basepair region after the start codon of the glnE gene was deleted to produce a truncated GlnE protein that does not comprise the adenylyl-removing (AR) domain resulting in a constitutively adenylylated glutamine synthetase. This remodeled CI137 is referred to herein as 137-1034. 137-1034 could excrete ammonia whereas the WT strain did not excrete ammonia (FIG. 26). However, 137-1034 showed reduced colonization compared to the WT strain (FIGS. 27-28). The step of generating non-intergeneric mutations was iterated to further remodel 137-1034 and to test if any improvement in ammonia excretion can be obtained. For this, the nifL gene was deleted from 20 bp after the ATG start codon to 87 bp before the TGA stop codon and a 400 bp fragment from the region upstream of the cspE gene containing a promoter of the cspE gene was inserted (Prm1.2) upstream of nifA replacing the deleted portion. This remodeled microbe is referred to herein as 137-2084. This strain showed improved ammonia excretion over 137-1034 (FIG. 26). When tested for colonization potential, 137-2084 showed slightly improved colonization compared to 137-1034; however, its colonization potential was still lower by ˜10-fold compared to the WT strain (FIGS. 27-28). The step of generating non-intergeneric mutations was iterated/repeated to test whether both the colonization potential and ammonia excretion could be improved. Specifically, the nifL gene was deleted from 20 bp after the ATG start codon to 87 bp before the TGA stop codon; a 400 bp fragment from the region upstream of the cspE gene containing a promoter of the cspE gene was inserted (Prm1.2) upstream of nifA replacing the deleted portion; and a 400 bp fragment from the region upstream of the cspE gene containing a promoter of the cspE gene was inserted (Prm1.2) upstream of the glsA2 gene replacing the native promoter of the gene. This strain is referred to herein as 137-2237. 137-2237 showed similar levels of improved ammonia excretion as 137-2084 (FIG. 26) and at the same time, the colonization potential of 137-2237 was similar or slightly improved compared to the WT strain (FIGS. 27-28).

[0668] The above description illustrates how steps D-F described in Example 1 can be used to iterate non-intergeneric mutations to stack improvements in multiple traits in remodeled microbes.

[0669] The ammonia excretion assay used here is as described in Example 2.

### Colonization Assay

[0670] Briefly, strains were grown overnight in rich media (SOB). Optical densities of culture media containing respective strains were measured, normalized to 1 and and 1 mL of the culture medium was used to inoculate a corn seed during planting in a grow-pot. Plants were grown for 3 weeks, then de-potted, and roots were washed to remove loose sand and debris. Samples of root tissue were taken from the seminal root and first node (found 1-2 inches below the crown), washed in PBS, and a gDNA prep was done on the solution.

[0671] Cells per gram/fresh weight was determined by running the gDNA preps through qPCR using strain specific primers. A more detailed description of the assay can be found in a PCT publication, WO/2019/032926, incorporated by reference herein in its entirety.

[0672] The above-described mutations made to the C1137 WT strain are summarized in Table 33 below.

TABLE 33
List of isolated and derivative K. variicola strains

| Strain | | | |
|---|---|---|---|
| ID | Genotype | Mutation | Mutation Description |
| 137 | WT | WT | Wild type Klebsiella variicola strain. |
| 137-1034 | ΔglnE_{AR}-KO2 | ΔglnE_{AR}-KO2 | Deletion of 1647bp after the start codon of the |
| | | | glnE gene. |
| 137-2084 | ΔnifL::Prm1.2, | ΔnifL::Prm1.2 | Deletion of the nifL gene from 20bp after the ATG |
| | ΔglnE_{AR}-KO2, | | (start) to 87bp before the TGA (stop) of the gene. |
| | | | A 400bp fragment from the region upstream of the |
| | | | cspE gene containing a promoter of the cspE gene |
| | | | was inserted (Prm1.2) upstream of nifA replacing |
| | | | the deleted portion. |
| | | ΔglnE_{AR}-KO2 | Deletion of 1647bp after the start codon of the |
| | | | glnE gene. |
| 137-2337 | ΔnifL::Prm1.2, | ΔnifL::Prm1.2 | Deletion of the nifL gene from 20bp after the ATG |
| | ΔglnE_{AR}-KO2, | | (start) to 87bp before the TGA (stop) of the gene. |
| | glsA2::Prm1.2 | | A 400bp fragment from the region upstream of the |
| | | | cspE gene containing a promoter of the cspE gene |
| | | | was inserted (Prm1.2) upstream of nifA replacing |
| | | | the deleted portion. |
| | | ΔglnE_{AR}-KO2 | Deletion of 1647bp after the start codon of the |
| | | | glnE gene. |
| | | glsA2::Prm1.2 | A 400bp fragment from the region upstream of the |
| | | | cspE gene containing a promoter of the cspE gene |
| | | | was inserted (Prm1.2) upstream of the glsA2 gene |
| | | | replacing the native promoter of the gene. |

### Numbered Embodiments of the Disclosure

[0673] Notwithstanding the appended claims, the disclosure sets forth the following numbered embodiments:
[0674] 1. A guided microbial remodeling method for the rational improvement of plant-associated microbes to perform plant-beneficial functions, comprising:
   [0675] a. providing a plurality of microbial species that are associated with a target plant of interest;
   [0676] b. sequencing the genomes of the plurality of microbial species and characterizing one or more genomic pathways, or sets of genes, that are associated with a plant-beneficial function of interest;
   [0677] c. assaying the plurality of microbial species for: colonization metrics, transcriptionally active genes under metabolically relevant environmental conditions, and ability to perform a plant-beneficial function of interest;
   [0678] d. selecting a candidate microbial species from the plurality of assayed microbial species;
   [0679] e. transforming the candidate microbial species with a transformation plasmid comprising:
      [0680] i. a selection marker,
      [0681] ii. a counterselection marker,
      [0682] iii. a DNA fragment comprising: a non-intergeneric genetic variation to be introduced into the candidate microbial species at a target genomic locus in one or more genomic pathways, or sets of genes, that are associated with a plant-beneficial function of interest, and homology arms to the target genomic locus flanking the non-intergeneric genetic variation; and
      [0683] iv. plasmid backbone,
   [0684] f. selecting for a candidate microbial species that has undergone an initial homologous recombination and has the non-intergeneric genetic variation integrated into the target genomic locus based on the presence of the selection marker in the genome;
   [0685] g. selecting for a candidate microbial species that has the non-intergeneric genetic variation integrated into the target genomic locus, but has undergone an additional homologous recombination that loops-out the plasmid backbone, based on the absence of the counterselection marker;
   [0686] h. sequencing the genome of the transformed candidate microbial species and confirming integration of the non-intergeneric genetic variation at the target genomic locus and absence of any genetic sequence from the transformation plasmid; and
   [0687] i. repeating steps e)-h) one or more times, until a candidate microbial species has acquired an improved ability to perform the plant-beneficial function of interest.
[0688] 2. The guided microbial remodeling method according to embodiment 1, wherein the plant-beneficial function of interest is nitrogen fixation.
[0689] 3. The guided microbial remodeling method according to embodiment 1, wherein the plant-beneficial function of interest is phosphate solubilization.
[0690] 4. The guided microbial remodeling method according to embodiment 1, wherein the plant-beneficial function of interest is microbial colonization.
[0691] 5. The guided microbial remodeling method according to any one of the embodiments 1-4, wherein step b) comprises whole genome sequencing.
[0692] 6. The guided microbial remodeling method according to any one of the embodiments 1-5, wherein step b) comprises characterizing the nitrogen fixation pathway.
[0693] 7. The guided microbial remodeling method according to any one of the embodiments 1-6, wherein step b) comprises characterizing a set of genes selected from the group consisting of: nifA, nifL, ntrB, ntrC, polynucleotide encoding glutamine synthetase, glnA, glnB, glnK, drat, amtB, polynucleotide encoding glutaminase, glnD, glnE, nifJ nifH, nifD, nifK, nifY, nifE, nifN, nifU, nifS, nifV, nifW, nifZ, nifM, nifF, nifB, nifQ, a gene associated with biosynthesis of a nitrogenase enzyme, and combinations thereof.
[0694] 8. The guided microbial remodeling method according to any one of the embodiments 1-7, wherein step c) comprises assaying the plurality of microbial species for colonization metrics under greenhouse or lab based conditions.
[0695] 9. The guided microbial remodeling method according to any one of the embodiments 1-7, wherein step c) comprises assaying the plurality of microbial species for colonization metrics under field conditions.
[0696] 10. The guided microbial remodeling method according to any one of the embodiments 1-7, wherein step c) comprises assaying the plurality of microbial species for colonization metrics under greenhouse or lab based conditions, and also under field conditions.
[0697] 11. The guided microbial remodeling method according to any one of the embodiments 1-10, wherein a colonization metric assayed in step c) comprises at least one of the following: spatial colonization patterns, temporal colonization dynamics, density of colonization, or combinations thereof.
[0698] 12. The guided microbial remodeling method according to any one of the embodiments 1-11, wherein assaying the plurality of microbial species for transcriptionally active genes under metabolically relevant environmental conditions in step c) occurs under greenhouse or lab based conditions.
[0699] 13. The guided microbial remodeling method according to any one of the embodiments 1-11, wherein assaying the plurality of microbial species for transcriptionally active genes under metabolically relevant environmental conditions in step c) occurs under greenhouse or lab based conditions and comprises measuring the transcriptomic profile of the microbial species.
[0700] 14. The guided microbial remodeling method according to any one of the embodiments 1-11, wherein assaying the plurality of microbial species for transcriptionally active genes under metabolically relevant environmental conditions in step c) occurs under greenhouse or lab based conditions and comprises measuring the transcriptomic activity of genes associated with the microbial species ability to perform a plant-beneficial function of interest.
[0701] 15. The guided microbial remodeling method according to any one of the embodiments 1-11, wherein assaying the plurality of microbial species for transcriptionally active genes under metabolically relevant environmental conditions in step c) occurs under greenhouse or lab based conditions and comprises measuring the transcriptomic activity of regulatory gene sequences.
[0702] 16. The guided microbial remodeling method according to any one of the embodiments 1-11, wherein assaying the plurality of microbial species for transcriptionally active genes under metabolically relevant environmental conditions in step c) occurs under greenhouse or lab based conditions and comprises measuring the transcriptomic activity of promoter sequences.
[0703] 17. The guided microbial remodeling method according to any one of the embodiments 1-11, wherein assaying the plurality of microbial species for transcriptionally active genes under metabolically relevant environmental conditions in step c) occurs under greenhouse or lab based conditions and comprises measuring the transcriptomic activity of promoter sequences in the presence of exogenous nitrogen.
[0704] 18. The guided microbial remodeling method according to any one of the embodiments 1-11, wherein assaying the plurality of microbial species for transcriptionally active genes under metabolically relevant environmental conditions in step c) occurs under greenhouse or lab based conditions and comprises measuring the transcriptomic activity of promoter sequences in the presence of exogenous nitrogen, wherein said transcriptomic activity of the promoter sequences is measured by quantifying the expression of a regulated gene.
[0705] 19. The guided microbial remodeling method according to any one of the embodiments 1-11, wherein assaying the plurality of microbial species for transcriptionally active genes under metabolically relevant environmental conditions in step c) occurs under field conditions.
[0706] 20. The guided microbial remodeling method according to any one of the embodiments 1-11, wherein assaying the plurality of microbial species for transcriptionally active genes under metabolically relevant environmental conditions in step c) occurs under field conditions and comprises measuring the transcriptomic profile of the microbial species.
[0707] 21. The guided microbial remodeling method according to any one of the embodiments 1-11, wherein assaying the plurality of microbial species for transcriptionally active genes under metabolically relevant environmental conditions in step c) occurs under field conditions and comprises measuring the transcriptomic activity of genes associated with the microbial species ability to perform a plant-beneficial function of interest.
[0708] 22. The guided microbial remodeling method according to any one of the embodiments 1-11, wherein assaying the plurality of microbial species for transcriptionally active genes under metabolically relevant environmental conditions in step c) occurs under field conditions and comprises measuring the transcriptomic activity of regulatory gene sequences.
[0709] 23. The guided microbial remodeling method according to any one of the embodiments 1-11, wherein assaying the plurality of microbial species for transcriptionally active genes under metabolically relevant environmental conditions in step c) occurs under field conditions and comprises measuring the transcriptomic activity of promoter sequences.
[0710] 24. The guided microbial remodeling method according to any one of the embodiments 1-11, wherein assaying the plurality of microbial species for transcriptionally active genes under metabolically relevant environmental conditions in step c) occurs under field conditions and comprises measuring the transcriptomic activity of promoter sequences in the presence of exogenous nitrogen.
[0711] 25. The guided microbial remodeling method according to any one of the embodiments 1-11, wherein assaying the plurality of microbial species for transcriptionally active genes under metabolically relevant environmental conditions in step c) occurs under field conditions and comprises measuring the transcriptomic activity of promoter sequences in the presence of exogenous nitrogen, wherein said transcriptomic activity of the promoter sequences is measured by quantifying the expression of a regulated gene.
[0712] 26. The guided microbial remodeling method according to any one of the embodiments 1-11, wherein assaying the plurality of microbial species for transcriptionally active genes under metabolically relevant environmental conditions in step c) occurs in vitro.
[0713] 27. The guided microbial remodeling method according to any one of the embodiments 1-11, wherein assaying the plurality of microbial species for transcriptionally active genes under metabolically relevant environmental conditions in step c) occurs in vitro and comprises measuring the transcriptomic profile of the microbial species.
[0714] 28. The guided microbial remodeling method according to any one of the embodiments 1-11, wherein assaying the plurality of microbial species for transcriptionally active genes under metabolically relevant environmental conditions in step c) occurs in vitro and comprises measuring the transcriptomic activity of genes associated with the microbial species ability to perform a plant-beneficial function of interest.
[0715] 29. The guided microbial remodeling method according to any one of the embodiments 1-11, wherein assaying the plurality of microbial species for transcriptionally active genes under metabolically relevant environmental conditions in step c) occurs in vitro and comprises measuring the transcriptomic activity of regulatory gene sequences.
[0716] 30. The guided microbial remodeling method according to any one of the embodiments 1-11, wherein assaying the plurality of microbial species for transcriptionally active genes under metabolically relevant environmental conditions in step c) occurs in vitro and comprises measuring the transcriptomic activity of promoter sequences.
[0717] 31. The guided microbial remodeling method according to any one of the embodiments 1-11, wherein assaying the plurality of microbial species for transcriptionally active genes under metabolically relevant environmental conditions in step c) occurs in vitro and comprises measuring the transcriptomic activity of promoter sequences in N-depleted and N-replete conditions.
[0718] 32. The guided microbial remodeling method according to any one of the embodiments 1-11, wherein assaying the plurality of microbial species for transcriptionally active genes under metabolically relevant environmental conditions in step c) occurs in vitro and comprises measuring the transcriptomic activity of promoter sequences in N-depleted and N-replete conditions, wherein said transcriptomic activity of the promoter sequences is measured by quantifying the expression of a regulated gene.
[0719] 33. The guided microbial remodeling method according to any one of the embodiments 1-7, wherein assaying the plurality of microbial species for colonization metrics, comprises: growing said plurality of microbial species in intimate association with a target plant.
[0720] 34. The guided microbial remodeling method according to any one of the embodiments 1-7, wherein assaying the plurality of microbial species for colonization metrics, comprises: growing said plurality of microbial species in intimate association with a target plant under greenhouse or lab based conditions.
[0721] 35. The guided microbial remodeling method according to any one of the embodiments 1-7, wherein assaying the plurality of microbial species for colonization metrics, comprises: growing said plurality of microbial species in intimate association with a target plant under field conditions.
[0722] 36. The guided microbial remodeling method according to any one of the embodiments 1-7, wherein assaying the plurality of microbial species for transcriptionally active genes under metabolically relevant environmental conditions, comprises: growing said plurality of microbial species in intimate association with a target plant.
[0723] 37. The guided microbial remodeling method according to any one of the embodiments 1-7, wherein assaying the plurality of microbial species for transcriptionally active genes under metabolically relevant environmental conditions, comprises: growing said plurality of microbial species in intimate association with a target plant under greenhouse or lab based conditions.
[0724] 38. The guided microbial remodeling method according to any one of the embodiments 1-7, wherein assaying the plurality of microbial species for transcriptionally active genes under metabolically relevant environmental conditions, comprises: growing said plurality of microbial species in intimate association with a target plant under field conditions.
[0725] 39. The guided microbial remodeling method according to any one of the embodiments 1-7, wherein assaying the plurality of microbial species for colonization metrics and transcriptionally active genes under metabolically relevant environmental conditions, comprises: growing said plurality of microbial species in intimate association with a target plant under field conditions.
[0726] 40. The guided microbial remodeling method according to any one of the embodiments 1-7, wherein step c) comprises assaying the plurality of microbial species for ability to perform a plant-beneficial function of interest under greenhouse or lab based conditions.
[0727] 41. The guided microbial remodeling method according to any one of the embodiments 1-7, wherein step c) comprises assaying the plurality of microbial species for nitrogen fixation activity.
[0728] 42. The guided microbial remodeling method according to any one of the embodiments 1-7, wherein step c) comprises assaying the plurality of microbial species for nitrogen fixation activity in an acetylene reduction assay or ammonium excretion assay.
[0729] 43. The guided microbial remodeling method according to any one of the embodiments 1-42, wherein the transformation plasmid of step e) is a suicide plasmid.
[0730] 44. The guided microbial remodeling method according to any one of the embodiments 1-43, wherein step h) comprises whole genome sequencing.
[0731] 45. A guided microbial remodeling method for the rational improvement of plant-associated microbes to perform plant-beneficial functions, comprising:
   [0732] a. providing a plurality of microbial species;
   [0733] b. assaying the plurality of microbial species for: colonization metrics, transcriptionally active genes under metabolically relevant environmental conditions, and ability to perform a plant-beneficial function of interest;
   [0734] c. selecting a candidate microbial species from the plurality of assayed microbial species;
   [0735] d. introducing one or more targeted non-intergeneric genetic variations into the candidate microbial species at a target genomic locus in one or more genomic pathways, or sets of genes, that are associated with a plant-beneficial function of interest, said non-intergeneric genetic variations selected from the group consisting of: full gene deletions, partial gene deletions, promoter insertions, single base pair changes, and combinations thereof;
   [0736] e. sequencing the genome of the candidate microbial species and confirming integration of the non-intergeneric genetic variation at the target genomic locus and absence of any transgenic genetic sequence; and
   [0737] f. repeating steps d)-e) one or more times, until a candidate microbial species has acquired an improved ability to perform the plant-beneficial function of interest.
[0738] 46. A guided microbial remodeling method for the rational improvement of plant-associated microbes to perform plant-beneficial functions, comprising:
   [0739] a. providing a plurality of microbial species;
   [0740] b. assaying the plurality of microbial species for: colonization metrics, transcriptionally active genes under metabolically relevant environmental conditions, and ability to perform a plant-beneficial function of interest;
   [0741] c. selecting a candidate microbial species from the plurality of assayed microbial species;
   [0742] d. introducing two or more targeted non-intergeneric genetic variations into the candidate microbial species at two or more target genomic loci, in one or more genomic pathways, or sets of genes, that are associated with a plant-beneficial function of interest, said non-intergeneric genetic variations selected from the group consisting of: full gene deletions, partial gene deletions, promoter insertions, single base pair changes, and combinations thereof; and
   [0743] e. sequencing the genome of the candidate microbial species and confirming introduction of the non-intergeneric genetic variations at the target genomic loci and absence of any transgenic genetic sequence.
[0744] 47. A computationally guided microbial remodeling method for the rational improvement of plant-associated microbes to perform plant-beneficial functions, comprising:
   [0745] a. accessing a plurality of microbial whole genome sequences;
   [0746] b. identifying a plurality of regulatory gene sequences that actively regulate the transcription of a gene under a metabolically relevant environmental condition;
   [0747] c. identifying a plurality of genes associated with a plant-beneficial function;
   [0748] d. selecting a regulatory gene sequence and a gene associated with a plant-beneficial function from said pluralities; wherein steps a)-d) occur in silico; and
   [0749] e. manufacturing, in vivo, a remodeled microbial cell that has the selected regulatory gene sequence operably linked to the selected gene associated with a plant-beneficial function, thereby improving the expression of the gene associated with a plant-beneficial function.
[0750] 48. A computationally guided microbial remodeling system for the rational improvement of plant-associated microbes to perform plant-beneficial functions, comprising:
   [0751] a. one or more processors; and
   [0752] b. one or more memories operatively coupled to the one or more processors and having instructions stored thereon, that when executed by the one or more processors, cause the system to:
      [0753] i. access a plurality of microbial whole genome sequences;
      [0754] ii. identify a plurality of regulatory gene sequences that actively regulate the transcription of a gene under a metabolically relevant environmental condition;
      [0755] iii. identify a plurality of genes associated with a plant-beneficial function; and
      [0756] iv. select a regulatory gene sequence and a gene associated with a plant-beneficial function from said pluralities.
[0757] 49. A computationally guided microbial remodeling method for the rational improvement of plant-associated microbes to perform plant-beneficial functions, comprising:
   [0758] a. activating a computer system having: one or more processors and one or more memories operatively coupled to the one or more processors and having instructions stored thereon, thereby causing the one or more processors to execute the instructions, and cause the system to:
      [0759] i. access a plurality of microbial whole genome sequences;
      [0760] ii. identify a plurality of regulatory gene sequences that actively regulate the transcription of a gene under a metabolically relevant environmental condition;
      [0761] iii. identify a plurality of genes associated with a plant-beneficial function;
      [0762] iv. select a regulatory gene sequence and a gene associated with a plant-beneficial function from said pluralities; and
   [0763] b. manufacturing, in vivo, a remodeled microbial cell that has the selected regulatory gene sequence operably linked to the selected gene associated with a plant-beneficial function, thereby improving the expression of the gene associated with a plant-beneficial function.
[0764] 50. A guided microbial remodeling method for the rational improvement of plant-associated microbes to perform plant-beneficial functions, comprising:
   [0765] a. providing a plurality of microbial species that are associated with a target plant of interest;
   [0766] b. assaying the plurality of microbial species for: colonization metrics, and ability to perform a plant-beneficial function of interest;
   [0767] c. selecting a candidate microbial species from the plurality of assayed microbial species;
   [0768] d. introducing one or more targeted non-intergeneric genetic variations into the candidate microbial species;
   [0769] e. confirming integration of the non-intergeneric genetic variation at the target genomic locus and absence of any transgenetic sequence; and
   [0770] f. repeating steps d) and e) one or more times, until the candidate microbial species has acquired an improved ability to perform the plant-beneficial function of interest.
[0771] 51. The guided microbial remodeling method according to embodiment 50, wherein the step b) comprises assaying the plurality of microbial species for transcriptionally active genes under metabolically relevant environmental conditions.
[0772] 52. The guided microbial remodeling method according to embodiment 50, comprising a step of sequencing the genomes of the plurality of microbial species obtained in step a) and characterizing one or more genomic pathways, or sets of genes, that are associated with a plant-beneficial function of interest.
[0773] 53. The guided microbial remodeling method according to embodiment 50, wherein the step d) of introducing one or more targeted non-intergeneric genetic variations into the candidate microbial species comprises:
   [0774] a. transforming the candidate microbial species with a transformation plasmid comprising:
      [0775] i. a selection marker,
      [0776] ii. a counterselection marker,
      [0777] iii. a DNA fragment comprising: a non-intergeneric genetic variation to be introduced into the candidate microbial species at a target genomic locus in one or more genomic pathways, or sets of genes, that are associated with a plant-beneficial function of interest, and homology arms to the target genomic locus flanking the non-intergeneric genetic variation, and
      [0778] iv. plasmid backbone;
   [0779] b. selecting for a candidate microbial species that has undergone an initial homologous recombination and has the non-intergeneric genetic variation integrated into the target genomic locus based on the presence of the selection marker in the genome; and
   [0780] c. selecting for a candidate microbial species that has the non-intergeneric genetic variation integrated into the target genomic locus, but has undergone an additional homologous recombination that loops-out the plasmid backbone, based on the absence of the counterselection marker.
[0781] 54. The guided microbial remodeling method according to embodiment 50, wherein the step e) of confirming integration of the non-intergeneric genetic variation at the target genomic locus and absence of any transgenetic sequence comprises sequencing the genome of the transformed candidate microbial species.
[0782] 55. The guided microbial remodeling method according to embodiment 50, wherein the step e) comprises confirming absence of any transgenetic sequence from the transformation plasmid.
[0783] 56. The guided microbial remodeling method according to embodiment 50, wherein the plant-beneficial function of interest is nitrogen fixation.
[0784] 57. The guided microbial remodeling method according to embodiment 50, wherein the plant-beneficial function of interest is phosphate solubilization.
[0785] 58. The guided microbial remodeling method according to embodiment 50, wherein the plant-beneficial function of interest is microbial colonization.
[0786] 59. The guided microbial remodeling method according to embodiment 52, wherein the step of sequencing comprises whole genome sequencing.
[0787] 60. The guided microbial remodeling method according to embodiment 52, comprising characterizing the nitrogen fixation pathway.
[0788] 61. The guided microbial remodeling method according to embodiment 52, comprising characterizing a set of genes selected from the group consisting of: nifA, nifL, ntrB, ntrC, polynucleotide encoding glutamine synthetase, glnA, glnB, glnK, drat, amtB, polynucleotide encoding glutaminase, glnD, glnE, nifJ nifH, nifD, nifK, nifY, nifE, nifty, nifU, nifS, nif, nifW, nifZ, nifM, nifF, nifB, nifA, a gene associated with biosynthesis of a nitrogenase enzyme, and combinations thereof.
[0789] 62. The guided microbial remodeling method according to embodiment 52, comprising characterizing one or more genes involved in a pathway selected from the group consisting of: exopolysaccharide production, endo-polygalaturonase production, trehalose production, and glutamine conversion.
[0790] 63. The guided microbial remodeling method according to embodiment 52, comprising characterizing one or more genes selected from the group consisting of: bcsii, bcsiii, yjbE, fhaB, pehA, otsB, treZ, glsA2, and combinations thereof
[0791] 64. The guided microbial remodeling method according to embodiment 52, comprising characterizing one or more genes selected from the group consisting of: nifA, nifL, ntrB, ntrC, polynucleotide encoding glutamine synthetase, glnA, glnB, glnK, drat, amtB, polynucleotide encoding glutaminase, glnD, glnE, nifJ, nifH, nifD, nifK, nifY, nifE, nifty, nifU, nifS, nifV, nifW, nifZ, nifM, nifF, nifB, nifA, a gene associated with biosynthesis of a nitrogenase enzyme, bcsii, bcsiii, yjbE, fhaB, pehA, otsB, treZ, glsA2, and combinations thereof
[0792] 65. The guided microbial remodeling method according to embodiment 50, wherein step b) comprises assaying the plurality of microbial species for colonization metrics under greenhouse or lab based conditions.
[0793] 66. The guided microbial remodeling method according to embodiment 50, wherein step b) comprises assaying the plurality of microbial species for colonization metrics under field conditions.
[0794] 67. The guided microbial remodeling method according to embodiment 50, wherein step b) comprises assaying the plurality of microbial species for colonization metrics under greenhouse or lab based conditions, and also under field conditions.
[0795] 68. The guided microbial remodeling method according to embodiment 50, wherein a colonization metric assayed in step b) comprises at least one of the following: spatial colonization patterns, temporal colonization dynamics, density of colonization, or combinations thereof
[0796] 69. The guided microbial remodeling method according to embodiment 51, wherein assaying the plurality of microbial species for transcriptionally active genes under metabolically relevant environmental conditions occurs under greenhouse or lab based conditions.
[0797] 70. The guided microbial remodeling method according to embodiment 51, wherein assaying the plurality of microbial species for transcriptionally active genes under metabolically relevant environmental conditions occurs under greenhouse or lab based conditions and comprises measuring the transcriptomic profile of the microbial species.
[0798] 71. The guided microbial remodeling method according to embodiment 51, wherein assaying the plurality of microbial species for transcriptionally active genes under metabolically relevant environmental conditions occurs under greenhouse or lab based conditions and comprises measuring the transcriptomic activity of genes associated with the microbial species ability to perform a plant-beneficial function of interest.
[0799] 72. The guided microbial remodeling method according to embodiment 51, wherein assaying the plurality of microbial species for transcriptionally active genes under metabolically relevant environmental conditions occurs under greenhouse or lab based conditions and comprises measuring the transcriptomic activity of regulatory gene sequences.
[0800] 73. The guided microbial remodeling method according to embodiment 51, wherein assaying the plurality of microbial species for transcriptionally active genes under metabolically relevant environmental conditions occurs under greenhouse or lab based conditions and comprises measuring the transcriptomic activity of promoter sequences.
[0801] 74. The guided microbial remodeling method according to embodiment 51, wherein assaying the plurality of microbial species for transcriptionally active genes under metabolically relevant environmental conditions occurs under greenhouse or lab based conditions and comprises measuring the transcriptomic activity of promoter sequences in the presence of exogenous nitrogen.
[0802] 75. The guided microbial remodeling method according to embodiment 51, wherein assaying the plurality of microbial species for transcriptionally active genes under metabolically relevant environmental conditions occurs under greenhouse or lab based conditions and comprises measuring the transcriptomic activity of promoter sequences in the presence of exogenous nitrogen, wherein said transcriptomic activity of the promoter sequences is measured by quantifying the expression of a regulated gene.
[0803] 76. The guided microbial remodeling method according to embodiment 51, wherein assaying the plurality of microbial species for transcriptionally active genes under metabolically relevant environmental conditions occurs under field conditions.
[0804] 77. The guided microbial remodeling method according to embodiment 51, wherein assaying the plurality of microbial species for transcriptionally active genes under metabolically relevant environmental conditions occurs under field conditions and comprises measuring the transcriptomic profile of the microbial species.
[0805] 78. The guided microbial remodeling method according to embodiment 51, wherein assaying the plurality of microbial species for transcriptionally active genes under metabolically relevant environmental conditions occurs under field conditions and comprises measuring the transcriptomic activity of genes associated with the microbial species ability to perform a plant-beneficial function of interest.
[0806] 79. The guided microbial remodeling method according to embodiment 51, wherein assaying the plurality of microbial species for transcriptionally active genes under metabolically relevant environmental conditions occurs under field conditions and comprises measuring the transcriptomic activity of regulatory gene sequences.
[0807] 80. The guided microbial remodeling method according to embodiment 51, wherein assaying the plurality of microbial species for transcriptionally active genes under metabolically relevant environmental conditions occurs under field conditions and comprises measuring the transcriptomic activity of promoter sequences.
[0808] 81. The guided microbial remodeling method according to embodiment 51, wherein assaying the plurality of microbial species for transcriptionally active genes under metabolically relevant environmental conditions occurs under field conditions and comprises measuring the transcriptomic activity of promoter sequences in the presence of exogenous nitrogen.
[0809] 82. The guided microbial remodeling method according to embodiment 51, wherein assaying the plurality of microbial species for transcriptionally active genes under metabolically relevant environmental conditions occurs under field conditions and comprises measuring the transcriptomic activity of promoter sequences in the presence of exogenous nitrogen, wherein said transcriptomic activity of the promoter sequences is measured by quantifying the expression of a regulated gene.
[0810] 83. The guided microbial remodeling method according to embodiment 51, wherein assaying the plurality of microbial species for transcriptionally active genes under metabolically relevant environmental conditions occurs in vitro.
[0811] 84. The guided microbial remodeling method according to embodiment 51, wherein assaying the plurality of microbial species for transcriptionally active genes under metabolically relevant environmental conditions occurs in vitro and comprises measuring the transcriptomic profile of the microbial species.
[0812] 85. The guided microbial remodeling method according to embodiment 51, wherein assaying the plurality of microbial species for transcriptionally active genes under metabolically relevant environmental conditions occurs in vitro and comprises measuring the transcriptomic activity of genes associated with the microbial species ability to perform a plant-beneficial function of interest.
[0813] 86. The guided microbial remodeling method according to embodiment 51, wherein assaying the plurality of microbial species for transcriptionally active genes under metabolically relevant environmental conditions occurs in vitro and comprises measuring the transcriptomic activity of regulatory gene sequences.
[0814] 87. The guided microbial remodeling method according to embodiment 51, wherein assaying the plurality of microbial species for transcriptionally active genes under metabolically relevant environmental conditions occurs in vitro and comprises measuring the transcriptomic activity of promoter sequences.
[0815] 88. The guided microbial remodeling method according to embodiment 51, wherein assaying the plurality of microbial species for transcriptionally active genes under metabolically relevant environmental conditions occurs in vitro and comprises measuring the transcriptomic activity of promoter sequences in N-depleted and N-replete conditions.
[0816] 89. The guided microbial remodeling method according to embodiment 51, wherein assaying the plurality of microbial species for transcriptionally active genes under metabolically relevant environmental conditions occurs in vitro and comprises measuring the transcriptomic activity of promoter sequences in N-depleted and N-replete conditions, wherein said transcriptomic activity of the promoter sequences is measured by quantifying the expression of a regulated gene.
[0817] 90. The guided microbial remodeling method according to embodiment 50, wherein assaying the plurality of microbial species for colonization metrics, comprises: growing said plurality of microbial species in intimate association with a target plant.
[0818] 91. The guided microbial remodeling method according to embodiment 50, wherein assaying the plurality of microbial species for colonization metrics, comprises: growing said plurality of microbial species in intimate association with a target plant under greenhouse or lab based conditions.
[0819] 92. The guided microbial remodeling method according to embodiment 50, wherein assaying the plurality of microbial species for colonization metrics, comprises: growing said plurality of microbial species in intimate association with a target plant under field conditions.
[0820] 93. The guided microbial remodeling method according to embodiment 51, wherein assaying the plurality of microbial species for transcriptionally active genes under metabolically relevant environmental conditions, comprises: growing said plurality of microbial species in intimate association with a target plant.
[0821] 94. The guided microbial remodeling method according to embodiment 51, wherein assaying the plurality of microbial species for transcriptionally active genes under metabolically relevant environmental conditions, comprises: growing said plurality of microbial species in intimate association with a target plant under greenhouse or lab based conditions.
[0822] 95. The guided microbial remodeling method according to embodiment 51, wherein assaying the plurality of microbial species for transcriptionally active genes under metabolically relevant environmental conditions, comprises: growing said plurality of microbial species in intimate association with a target plant under field conditions.
[0823] 96. The guided microbial remodeling method according to embodiment 51, wherein assaying the plurality of microbial species for colonization metrics and transcriptionally active genes under metabolically relevant environmental conditions, comprises: growing said plurality of microbial species in intimate association with a target plant under field conditions.
[0824] 97. The guided microbial remodeling method according to embodiment 50, wherein step b) comprises assaying the plurality of microbial species for ability to perform a plant-beneficial function of interest under greenhouse or lab based conditions.
[0825] 98. The guided microbial remodeling method according to embodiment 50, wherein step b) comprises assaying the plurality of microbial species for nitrogen fixation activity.
[0826] 99. The guided microbial remodeling method according to embodiment 50, wherein step b) comprises assaying the plurality of microbial species for nitrogen fixation activity in an acetylene reduction assay or ammonium excretion assay.
[0827] 100. The guided microbial remodeling method according to embodiment 50, wherein the transformation plasmid is a suicide plasmid.
[0828] 101. The guided microbial remodeling method according to embodiment 54, wherein the sequencing comprises whole genome sequencing.
[0829] 102. A guided microbial remodeling method for the rational improvement of plant-associated microbes to perform plant-beneficial functions, comprising:
   [0830] a. providing a plurality of microbial species;
   [0831] b. assaying the plurality of microbial species for: colonization metrics, and ability to perform a plant-beneficial function of interest;
   [0832] c. selecting a candidate microbial species from the plurality of assayed microbial species;
   [0833] d. introducing one or more targeted non-intergeneric genetic variations into the candidate microbial species at a target genomic locus in one or more genomic pathways, or sets of genes, that are associated with a plant-beneficial function of interest;
   [0834] e. confirming integration of the non-intergeneric genetic variation at the target genomic locus and absence of any transgenic genetic sequence; and
   [0835] f. repeating steps d)-e) one or more times, until a candidate microbial species has acquired an improved ability to perform the plant-beneficial function of interest.
[0836] 103. The guided microbial remodeling method according to embodiment 102, wherein the step b) comprises assaying transcriptionally active genes under metabolically relevant environmental conditions.
[0837] 104. The guided microbial remodeling method according to embodiment 102, wherein in step d), said non-intergeneric genetic variations are selected from the group consisting of: full gene deletions, partial gene deletions, promoter insertions, single base pair changes, and combinations thereof.
[0838] 105. The guided microbial remodeling method according to embodiment 102, wherein step e) comprises sequencing the genome of the candidate microbial species.
[0839] 106. A guided microbial remodeling method for the rational improvement of plant-associated microbes to perform plant-beneficial functions, comprising:
   [0840] a. providing a plurality of microbial species;
   [0841] b. assaying the plurality of microbial species for: colonization metrics, and ability to perform a plant-beneficial function of interest;
   [0842] c. selecting a candidate microbial species from the plurality of assayed microbial species;
   [0843] d. introducing two or more targeted non-intergeneric genetic variations into the candidate microbial species at two or more target genomic loci, in one or more genomic pathways, or sets of genes, that are associated with a plant-beneficial function of interest; and
   [0844] e. confirming introduction of the non-intergeneric genetic variations at the target genomic loci and absence of any transgenic genetic sequence.
[0845] 107. The guided microbial remodeling method according to embodiment 106, wherein step b) comprises assaying transcriptionally active genes under metabolically relevant environmental conditions.
[0846] 108. The guided microbial remodeling method according to embodiment 106, wherein in step d), said non-intergeneric genetic variations are selected from the group consisting of: full gene deletions, partial gene deletions, promoter insertions, single base pair changes, and combinations thereof.
[0847] 109. The guided microbial remodeling method according to embodiment 106, wherein step e) comprises sequencing the genome of the candidate microbial species.

[0848] While preferred embodiments of the present disclosure have been shown and described herein, it will be obvious to those skilled in the art that such embodiments are provided by way of example only. Numerous variations, changes, and substitutions will now occur to those skilled in the art without departing from the disclosure. It should be understood that various alternatives to the embodiments of the disclosure described herein may be employed in practicing the disclosure. It is intended that the following Claims define the scope of the disclosure and that methods and structures within the scope of these claims and their equivalents be covered thereby.

### INCORPORATION BY REFERENCE

[0849] All references, articles, publications, patents, patent publications, and patent applications cited herein are incorporated by reference in their entireties for all purposes. However, mention of any reference, article, publication, patent, patent publication, and patent application cited herein is not, and should not be taken as, an acknowledgment or any form of suggestion that they constitute valid prior art or form part of the common general knowledge in any country in the world. Further, U.S. Pat. No. 9,975,817, issued on May 22, 2018, and entitled: Methods and Compositions for Improving Plant Traits, is hereby incorporated by reference. Further, PCT/US2018/013671, filed Jan. 12, 2018, and entitled: Methods and Compositions for Improving Plant Traits, is hereby incorporated by reference.

The application's sequence listing, which the Patent Office published only in electronic form, follows.

SEQUENCE LISTING (433 sequences)

SEQ ID NO: 1 - protein, 9 aa, Unknown
  "LAGLIDADG" family peptide motif sequence
LAGLIDADG

SEQ ID NO: 2 - DNA, 90 bp, Artificial Sequence
  Synthetic oligonucleotide
gttgatcagaccgatgttcggaccttccaaggtttcgatcggacatacgcgaccgtagtgggtcgggtgtacgtctcgaacttcaaagcc

SEQ ID NO: 3 - DNA, 257 bp, Artificial Sequence
  Synthetic polynucleotide
gcctctcggggcgcttttttttattccggcactagccgctattaataaaaatgcaaatcggaatttactatttaacgcgagattatctaagatgaatccgatggaagcgcgctgttttcactcgcctttttaaagttacgtgatgatttcgatgcttctttgagcgaacgatcaaaaataagcgtattcaggtaaaaaaatattctcatcacaaaaaagtttgtgtaatacttgtaacgctacatggagattaactc

SEQ ID NO: 4 - DNA, 260 bp, Artificial Sequence
  Synthetic polynucleotide
ggttcacataaacataattatcgccacggcgatagccgtacgctttttgcgtcacaacatccatggtgaagccggctttttcaagaacacgcgccacctcatcgggtcttaaatacatactcattcctcattatcttttaccgcacgttaaccttaccttattcattaaaggcaacgctttcggaatattccataaagggctatttacagcataattcaaaatcttgtcctacacttatagactcaatggaattaaggga

SEQ ID NO: 5 - DNA, 260 bp, Artificial Sequence
  Synthetic polynucleotide
gcgcggaaaatcgacgcatagcgcattctcagaagccggcctggtctcggtggaaaagcgaatctttcccacgaccgccgggcctttaacaaaagaatcaatgacctgattaatgtcgctatccattctctctccgcgtaatgcgatcttttttcatcatacctaacaaactggcagagggaaaagccgcgcggtttttctgcgaagtgtattgtaagatttgtttgatatgttatatcgtaacatattattgcaaacat

SEQ ID NO: 6 - DNA, 259 bp, Artificial Sequence
  Synthetic polynucleotide
ctgacgaagcgagttacatcaccggtgaaactctgcacgtcaacggcggaatgtatatggtctgaccgagatttgcgcaaaacgctcaggaaccgcgcagtctgtgcggttcactgtaatgttttgtacaaaatgatttgcgttatgagggcaaacagccgcaaaatagcgtaaaatcgtggtaagacctgccgggatttagttgcaaatttttcaacattttatacactacgaaaaccatcgcgaaagcgagttttga

SEQ ID NO: 7 - DNA, 260 bp, Artificial Sequence
  Synthetic polynucleotide
acgcctggggcgccgaccagcgggaagagtgatttggccaacgaggcgccgctctgaatggaaatcatggcgattaaaataaccagtatcggcaaccatgccggtaccttacgagacgagccgggcatcctttctcctgtcaattttgtcaaatgcggtaaaggttccagtgtaattgaattaccccgcgccggttgagctaatgttgaaaaaaagggtcttaaaagcagtacaatagggcgggtctgaagataatttca

SEQ ID NO: 8 - DNA, 260 bp, Artificial Sequence
  Synthetic polynucleotide
tctgattcctgatgaaaataaacgcgaccttgaagaaattccggataacgttatcgccgatttagatatccatccggtgaaacgaatcgaggaagttctggcacttgcgctacagaacgaaccgtttggaatggaagtcgtcacggcaaaatagtgatttcgcgcaaatagcgctaagaaaaatagggctggtaagtaaattcgtacttgccagcctttttttgtgtagctaacttagatcgctggcaggggggtcaatt

SEQ ID NO: 9 - DNA, 259 bp, Artificial Sequence
  Synthetic polynucleotide
gtaagaaagtcggcctgcgtaaagcacgtcgtcgtcctcagttctccaaacgttaattgttttctgctcacgcagaacaatttgcgaaaaaacccgcttcggcgggtttttttatggataaatttgccattttccctctacaaacgccccattgttaccactttttcagcatttccagaatcccctcaccacaacgtcttcaaaatctggtaaactatcatccaattttctgcccaaatgcaggtgattgttcattttt

SEQ ID NO: 10 - DNA, 260 bp, Artificial Sequence
  Synthetic polynucleotide
gtcaaagccgtattatcgaccccttagggacaacgcttgccggggcgggagagcggccgcagttgatttttgccgaactttcagctgattatattcagcaggtacgcgagcgcctgccggtgttgcgcaatcgccgctttgcgccaccgcaattattatgacgtttttttaaacaaggcttgattcaccttgttacagattgctattgtgtccgcgcgtcaaatagccgttaattgtatgcgtgtatgatggcgtattcg

SEQ ID NO: 11 - DNA, 260 bp, Artificial Sequence
  Synthetic polynucleotide
gaggcggtggttgaccgtatcggtcccgagcatcatgagctttcggggcgagcgaaagatatgggatcggcggcggtactgctggcgattatcatcgcgctgatcgcgtggggaacgctgctgtgggcgaactaccgctaagtcttgtcgtagctgctcgcaaaacggaaagaaactcctgatttttgtgtgaaatgtggttccaaaatcaccgttagctgtatatactcacagcataactgtatatacacccagggggc

SEQ ID NO: 12 - DNA, 260 bp, Artificial Sequence
  Synthetic polynucleotide
taagaaaagcggcctgtacgaagacggcgtacgtaaagacaggctggataacgacgatatgatcgatcagctggaagcgcgtattcgcgctaaagcatcgatgctggatgaggcgcgtcgtatcgatatccagcaggttgaagcgaaataacgtgttgggaagcgatacgcttcccgtgtatgattgaacctgcgggcgcgaggcgccggggttcatttttgtatatataaagagaataaacgtggcaaagaacattcaa

SEQ ID NO: 13 - DNA, 237 bp, Artificial Sequence
  Synthetic polynucleotide
atgaatcgtactaaactggtactgggcgcggtaatcctgggttctactctgctggctggttgctccagcaatgctaaaatcgatcagctgtcttctgacgttcagactctgaacgctaaagttgaccagctgagcaacgacgtgaacgcaatgcgttccgacgttcaggctgctaaagatgacgcagctcgcgctaaccagcgtctggacaacgcagctactaaataccgtaagtaa

SEQ ID NO: 14 - DNA, 327 bp, Artificial Sequence
  Synthetic polynucleotide
atggccaaccgagcaaaccgcaacaacgtagaagagagcgctgaagatatccataacgatgtcagccaattagcggatacgctggaagaggtgctgaaatcgtggggcagcgacgccaaagacgaagcggaggccgcgcgcaaaaaagcgcaggcgctgctgaaagagacccgcgcccggcttaacggcaacaaccgcgtccagcaggcggcgtgcgacgccatgggctgcgctgacagctacgtgcgcgacaaaccgtggcaaagcgtcggcgccgcagcagccgttggggtatttattggcgtattactgaatttacgtcgataa

SEQ ID NO: 15 - DNA, 648 bp, Artificial Sequence
  Synthetic polynucleotide
atgaccaaaaagatttccgccctagcgtttggcattggcatggtaatggcgagcagccaggcttttgcccacggtcaccatagtcatggcccggcgctgaccgaagcggaacaaaaggcgagtgaaggcatttttgctgaccaggacgtaaaggacagggcgctgagcgactgggaggggatctggcagtcggttaacccctatctgctgaacggggatttagatccggttctggagcagaaggccaaaaaggccggtaaaagcgtggcggaatatcgggaatattataagaagggctacgctaccgatgtcgaccagattggtatcgaggataacgtcatggagtttcacgtcgggaaaaccgtcaacgcctgtaagtacagctattccggttacaaaattctgacctacgcatccggtaaaaaaggcgtgcgctacctgttcgaatgccagcaggcggattcaaaagcgccgaagtttgttcagtttagcgatcacaccatcgcgccacgcaagtcccagcatttccacatctttatgggcaatgagtcccaggaagcgctgctgaaagagatggataactggccaacctactatccttatgcgctgcataaagagcagattgtcgacgaaatgctgcaccactaa

SEQ ID NO: 16 - DNA, 237 bp, Artificial Sequence
  Synthetic polynucleotide
atgagcactatcgaagaacgcgttaagaaaattatcggcgaacagctgggcgttaagcaggaagaagttaccaacaatgcttccttcgttgaagacctgggcgctgattctcttgacaccgttgagctggtaatggctctggaagaagagtttgatactgagattccggacgaagaagctgagaaaatcactactgttcaggctgccattgattacatcaacggccaccaggcgtaa

SEQ ID NO: 17 - DNA, 513 bp, Artificial Sequence
  Synthetic polynucleotide
atgaataaaattgcacgtttttcagcactggccgttgttctggctgcatccgtaggtaccactgctttcgctgcgacttctaccgttaccggtggctacgcgcagagcgacatgcagggtgaagcgaacaaagctggcggtttcaacctgaagtaccgctacgagcaagacaacaacccgctgggtgttatcggttctttcacctacaccgaaaaagatcgttctgaatctggcgtttacaaaaaaggccagtactacggcatcaccgcaggtccggcttaccgtctgaacgactgggctagcatctacggcgtagtgggtgttggttacggtaaattccaggacaacagctacccgaacaaatctgatatgagcgactacggtttctcttacggcgctggtctgcagttcaacccgatcgaaaacgttgccctggacttctcctacgagcagtctcgcattcgtaacgttgacgttggcacctggattgctggcgtaggttaccgcttctaa

SEQ ID NO: 18 - DNA, 273 bp, Artificial Sequence
  Synthetic polynucleotide
gtgaataaatctcaactgattgacaaaattgctgccggtgcggacatttctaaagccgcagctggacgtgcgttagatgctttaatcgcttctgttactgaatctctgcaggctggagatgacgttgcgctggtagggtttggtacttttgctgttaaagagcgcgctgcccgtactggtcgcaatccgcaaacaggcaaagaaatcaccattgctgctgctaaagttccgggtttccgcgcaggtaaagcgctgaaagacgcggtaaactga

SEQ ID NO: 19 - DNA, 639 bp, Artificial Sequence
  Synthetic polynucleotide
atggctgtcgctgccaacaaacgttcggtaatgacgctgttttctggtcctactgacatctatagccatcaggtccgcatcgtgctggccgaaaaaggtgttagttttgagatagagcacgtggagaaggacaacccgcctcaggatctgattgacctcaacccgaatcaaagcgtaccgacgcttgtggatcgtgagctcactctgtgggaatctcgcatcattatggaatatctggatgagcgtttcccgcatccgccgctcatgccggtttacccggtggcgcgtggggaaagccgtctgtatatgcagcgtatcgaaaaggactggtattcgttgatgaataccattcagaccggtaccgctgcgcaggctgatactgcgcgtaagcagctgcgtgaagaactacaggcgattgcgccagttttcacccagaagccctacttcctgagcgatgagttcagcctggtggactgctacctggcaccactgctgtggcgtctgccggttctcggcgtagagctggtcggcgctggcgcgaaagagcttaaaggctatatgactcgcgtatttgagcgcgactctttcctcgcttctttaactgaagccgaacgtgaaatgcgtctcggtcggggctaa

SEQ ID NO: 20 - DNA, 204 bp, Artificial Sequence
  Synthetic polynucleotide
atgggtgagattagtattaccaaactgctggtagtcgcagcgctgattatcctggtgtttggtaccaaaaagttacgcacgctgggtggagacctgggctcggctatcaaaggctttaaaaaagccatgagcgatgacgatgacagtgcgaagaagaccagtgctgaagaagcgccggcacagaagctctctcataaagagtaa

SEQ ID NO: 21 - DNA, 609 bp, Artificial Sequence
  Synthetic polynucleotide
atgaaagcgttaacgaccaggcagcaagaggtgtttgatctcattcgggatcatatcagccagacgggcatgccgccgacgcgtgcggagattgctcagcgcttggggtttcgctccccaaacgcggcggaagagcatctgaaagcgctggcgcgtaaaggcgcaatcgagatcgtttccggcgcctcccgcggtattcgtctgctgacggaagaagaaaccggtctgccgcttattggccgcgtcgcggcaggtgagccgctgctagcgcagcagcacattgaaggccactaccaggtggacccggccatgtttaagccgaacgccgattttctgctgcgtgttagcggtatgtcgatgaaggatatcggtattctcgatggcgacctgctggctgtccataaaacgcaggatgtgcgcaatggtcaggtggttgtggcgcgtatcgacgaagaagtgaccgtgaagcgtctgaaaaaacagggtaacgtcgtggaattgctgccggaaaacagcgaattctcgccgatcgtggtcgaccttcgcgaacaaagctttactattgaaggcctggccgtcggcgttatccgcaacggcaactggcaataa

SEQ ID NO: 22 - DNA, 1245 bp, Artificial Sequence
  Synthetic polynucleotide
atgaacgattatctgccgggcgaaaccgctctctggcagcgcattgaaggctcactgaagcaggtgcttggtagctacggttacagcgaaatccgtttgccgattgtagagcagaccccgttattcaaacgcgctatcggcgaagtgaccgacgtggttgaaaaagagatgtacacctttgaggaccgtaacggcgatagcctgactctacgtccggaaggcacggctggctgcgtacgcgccggtatcgaacatggtctcctgtacaatcaagaacagcgcctgtggtacattgggccgatgttccgccacgaacgtccgcaaaaaggccgctaccgtcagttccaccagattggcgccgaagcgtttggcctgcaggggccggatatcgatgccgagctgattatgctgaccgcccgctggtggcgcgagctgggcatctccggccacgttgcgctggagctgaactctatcggttcgctggaggctcgcgctaactatcgcgacgcgctggtggcctatcttgagcagtttaaagataagctggacgaagactgcaaacgccgcatgtacaccaacccgctgcgcgtgctggattctaaaaacccggacgtccaggcgctgctgaacgacgccccgacgctgggcgactatcttgatgaagagtccaaaacgcattttgccgggctgtgcgcgctgctggatgatgccggtattcgctataccgtgaatcagcgtctggtacgcggtctcgactactacaaccgcaccgtgtttgagtgggtcaccaccagcctcggttcccagggcaccgtctgcgccggaggccgttacgatggtctggttgagcagcttggcggtcgcgctacccctggcgtcggctttgcgatggggctggaacgtcttgttttactggttcaggcagtgaatccggaatttaaagccgatcctgttgtcgatatatacctggtagcctccggaactgacacccagtccgcagcaatgcgtctggctgaacaggtacgcgatgcgttacccggcgttaagctgatgaccaaccatggcggcggcaactttaagaagcagtttgcgcgcgctgataaatggggcgctcgcgttgcgctggtgctgggcgaatcagaaatcgccgacggaaacgtggtagtgaaagatttacgctcaggtgagcaaactaccgtaacgcaggatagcgttgctgcgcatttgcgcacacttctgggttaa

SEQ ID NO: 23 - DNA, 1413 bp, Artificial Sequence
  Synthetic polynucleotide
atgaaaaagaccaaaattgtttgcaccatcggtccgaaaaccgaatccgaagagatgttgaccaaaatgctggacgcgggcatgaacgttatgcgtctgaacttctctcacggtgactatgcggaacacggtcagcgcatccagaatctgcgcaatgtgatgagtaaaaccggtaagaaagcggcaatcctgctggacaccaaaggtccggaaatccgtaccattaagctggaaggcggcaacgacgtctccctgaaagcgggccagaccttcaccttcaccaccgataaatccgttgtcggtaataacgaaatcgttgcggtgacctatgaaggcttcaccagcgacctgagcgttggcaacacggtactggttgacgatggtctgatcggtatggaagtgaccgctatcgaaggcaacaaagttgtttgtaaagtgctgaacaacggcgacctcggcgagaacaaaggcgttaacctgccgggcgtatctatcgcgctgccggcgctggctgaaaaagacaaacaggatctgatcttcggttgcgaacagggcgttgactttgttgcggcatcctttatccgtaagcgttctgacgttgttgaaatccgtgagcacctgaaagcccacggcggcgagaagatccagatcatctccaaaatcgaaaaccaggaaggcctgaacaacttcgacgaaatcctcgaagcctctgacggcatcatggtagcccgtggcgacctgggcgttgaaatcccggttgaagaagttatcttcgcgcagaagatgatgatcgagaaatgtatccgcgcgcgtaaagtcgttatcaccgcgacccagatgctggattccatgatcaaaaacccgcgtccgacccgtgcggaagcaggcgacgtggccaacgccatcctcgacggcaccgacgcagttatgctgtccggcgaatccgcgaaaggtaaatacccgctggaagcggtcaccatcatggcgaccatctgcgaacgtaccgaccgcgtcatgaccagccgtcttgagtacaacaacgacaaccgtaagctgcgcatcaccgaagcggtgtgccgcggtgcggtagaaacggctgaaaaactggaagcgccgctgatcgttgtggcaacccagggcggtaaatccgcgcgcgccgtacgtaaatacttcccggatgccactatcctggcgctgaccaccaacgaaaccaccgcgcgtcagctggtgctgagcaaaggcgttgtggcacagctggttgaagatatctcctctaccgatgcgttctacatccagggtaaagaactggcgctgcagagcggtctggcgcgtaaaggcgacgtggttgttatggtttccggcgcgttagtcccgagcggaaccaccaataccgcttccgtgcacgtgctgtaa

SEQ ID NO: 24 - DNA, 351 bp, Artificial Sequence
  Synthetic polynucleotide
atgtatttaagacccgatgaggtggcgcgtgttcttgaaaaagccggcttcaccatggatgttgtgacgcaaaaagcgtacggctatcgccgtggcgataattatgtttatgtgaaccgtgaagctcgtatggggcgtaccgcgttaattattcatccggctttaaaagagcgcagcacaacgcttgcggagcccgcgtcggatatcaaaacctgcgatcattatgagcagttcccgctctatttagcgggggatgctcaacagcattatggtattccacacgggttcagttcgcgaatggcgcttgagcgttttctgagtggcctgtttggcgaaacgcagtatagctga

SEQ ID NO: 25 - DNA, 864 bp, Artificial Sequence
  Synthetic polynucleotide
atggatagcgacattaatcaggtcattgattcttttgttaaaggcccggcggtcgtgggaaagattcgcttttccaccgagaccaggccggcttctgagaatgcgctatgcgtcgattttccgcgcctcgaaatcatgcttgcgggtcagcttcacgatccggcgattaaagccgatcgcgcccagctcatgccgcacgatgtgctgtatattcccgctggcggatggaatgacccgcaatggctggcgccctccactctgctcactatcttatttggtaaacagcagctggaattcgtcctgcgccactgggacggcagcgcgcttaacgtgctggataaacagcaggttccgcgccgcggtccccgggtcggctcttttctgctgcaggcgctgaatgaaatgcagatgcagccgcgggagcagcacacggcccgctttattgtcaccagcctgctcagccactgtgccgatctgctgggcagccaggtacaaacctcatcgcgcagccaggcgctttttgaagcgattcgtaagcatattgacgcccactttgccgacccgttaacccgggagtcggtggcgcaggcgttttacctctcgccaaactatctatcccacctgttccagaaatgcgggccaatgggctttaacgagtatctgaatcacatccgcctggagcaggccagaatgctgttaaaaggccacgatatgaaagtgaaagatatcgcccacgcctgcggtttcgccgacagcaactacttctgccgcctgtttcgcaaaaacaccgaacgctcgccgtcggagtatcgccgtcaatatcacagccagctgacggaaaaaacagccccggcaaaaaactag

SEQ ID NO: 26 - DNA, 735 bp, Artificial Sequence
  Synthetic polynucleotide
atgagttttgaaggaaaaatcgcgctggttaccggtgcaagtcgcgggattggccgcgcaatcgctgaaacgctcgttgcccgtggcgcgaaagttatcgggactgcgaccagcgaaagcggcgcgcaggcgatcagcgattatttaggtgctaacggtaaaggtctgctgctgaatgtgaccgatcctgcatctattgaatctgttctgggaaatattcgcgcagaatttggtgaagttgatatcctggtgaacaatgccgggatcactcgtgataacctgttaatgcgcatgaaagatgatgagtggaacgatattatcgaaaccaacctgtcatctgttttccgtctgtcaaaagcggtaatgcgcgctatgatgaaaaagcgtcatggacgtattatcactatcggttctgtggttggtaccatgggaaatgcgggtcaggccaactacgctgcggcgaaagcgggtctgattggcttcagtaaatcactggctcgcgaagttgcgtcccgcggtattactgtaaacgttgttgctccgggctttattgaaacggacatgacgcgtgcgctgaccgatgagcagcgtgcgggtacgctggcggcagttcctgcggggcgcctcggctctccaaatgaaatcgccagtgcggtggcatttttagcctctgacgaagcgagttacatcaccggtgaaactctgcacgtcaacggcggaatgtatatggtctga

SEQ ID NO: 27 - DNA, 71 bp, Artificial Sequence
  Synthetic oligonucleotide
atgcccggctcgtctcgtaaggtaccggcatggttgccgatactggttattttaatcgccatgatttccat

SEQ ID NO: 28 - DNA, 2355 bp, Artificial Sequence
  Synthetic polynucleotide
atgaatcctgagcgttctgaacgcattgaaatccccgtattgccgttgcgcgatgtggtggtttatccgcacatggtcatacccctgtttgtagggcgggaaaaatctatccgttgtctcgaagcagccatggaccatgataaaaaaatcatgctggttgcgcagaaagaagcctcgacggatgagccgggtgtaaacgatcttttcaccgtcgggaccgtggcgtctattttgcaaatgctgaagctaccggacggtactgttaaagtgctggtcgaaggtttgcagcgcgcgcgcatctctgcgctgtctgataatggcgaacatttttcggcgaaggcggaataccttgaatcgccggcgattgacgaacgcgagcaggaagtgctggttcgtaccgctatcagccagtttgaaggctacatcaagctgaacaaaaaaatccctccggaagtgctgacgtcgctgaatagcatcgacgatccggcgcgtctggcggataccatcgctgcgcatatgccgctgaagctggcggacaaacagtccgtgctggagatgtccgacgttaacgagcgtctggaatatctgatggcgatgatggagtcggaaatcgatctgctgcaggtggagaagcgtattcgcaaccgcgtgaaaaagcagatggagaaatctcagcgcgagtactatctgaatgagcaaatgaaagccattcaaaaagagctcggcgagatggacgacgccccggacgagaacgaagcgctgaagcgtaagatcgacgcggcgaaaatgccgaaagaggcaaaagagaaaaccgaagcggaactgcaaaaactgaaaatgatgtccccgatgtcggcggaagcgaccgtcgttcgcggctacatcgactggatggtgcaggtaccgtggaacgctcgcagcaaggttaaaaaagacctgcgtcaggctcaggagatcctcgataccgatcactacggccttgagcgcgtgaaggatcgcattcttgagtacctcgcggtgcagagccgtgttaacaagctcaaagggccgatcctgtgcctggttgggcctccgggggtaggtaaaacctctctcggccaatccatcgccaaagcaactggacgcaaatatgtgcgtatggcgctgggcggcgtgcgtgatgaagcggaaatccgcggtcaccgccgtacctatattggctcaatgccgggcaaactgatccagaaaatggctaaagtgggcgttaaaaacccgctgttcttgctggatgagatcgacaagatgtcttctgacatgcgcggcgatccggcctcggcgctgctggaggtgttggatccggaacagaacgtggcctttaacgaccactatctggaagtggattacgatctcagcgacgtgatgttcgttgcgacctctaactccatgaacatcccggcgccgctgctggatcgtatggaagtgatccgcctctccggctataccgaagatgagaagctaaacatcgccaaacgccatctgctgtcaaaacagattgagcgtaacgcgctcaagaaaggcgagctgacggtggatgacagcgcgattatcggcatcattcgctactacacccgtgaagcaggcgtgcgtggtctggagcgtgaaatctcgaaactgtgccgcaaagcggtgaaacagctgctgctggataagtcgctgaaacacatcgagattaacggcgacaacctgcacgatttccttggcgtgcagcgctacgactatggtcgtgcggatagcgaaaaccgcgtaggtcaggtgaccggactggcgtggacggaagtgggcggcgatctgctgaccattgaaaccgcctgcgttccgggtaaaggcaaactgacctacaccggttcactgggtgaagtcatgcaggaatccatccaggcggcgctgacggtggttcgttcacgtgcggataagctgggtattaactcagacttttacgaaaaacgtgatattcacgttcacgtgccggaaggcgcgacgccgaaggatggtccaagcgccggtatcgcgatgtgcaccgcgctggtttcctgtctgacgggtaatccggtacgcgccgacgtggcgatgaccggtgagattaccctccgtggccaggtattgccgattggtggtctgaaggaaaaactgttggccgcgcatcgcggcggcattaagactgttctgattcctgatgaaaataaacgcgaccttgaagaaattccggataacgttatcgccgatttagatatccatccggtgaaacgaatcgaggaagttctggcacttgcgctacagaacgaaccgtttggaatggaagtcgtcacggcaaaatag

SEQ ID NO: 29 - DNA, 393 bp, Artificial Sequence
  Synthetic polynucleotide
atggctgaaaatcaatactacggcaccggtcgccgcaaaagttccgcagctcgcgttttcatcaaaccgggcaacggtaaaatcgttatcaaccagcgttctctggaacagtacttcggtcgtgaaactgcccgcatggtagttcgtcagccgctggaactggtcgacatggttgagaaattagatctgtacatcaccgttaaaggtggtggtatctctggtcaggctggtgcgatccgtcacggtatcacccgcgctctgatggagtacgacgagtccctgcgtggcgaactgcgtaaagctggtttcgttactcgtgatgctcgtcaggttgaacgtaagaaagtcggcctgcgtaaagcacgtcgtcgtcctcagttctccaaacgttaa

SEQ ID NO: 30 - DNA, 789 bp, Artificial Sequence
  Synthetic polynucleotide
atgtttgttgctgccggacaatttgccgtaacgccggactggacgggaaacgcgcagacctgcgtcagcatgatgcgccaggccgcggagcggggggcgtcgcttctggttctgcctgaggcgttgctggcgcgagacgataacgatgcggatttatcggttaaatccgcccagcagctggatggcggcttcttacagctcttgctggcggagagcgaaaacagcgctttgacgacggtgctgaccctgcatatcccttccggcgaaggtcgagcgacgaatacgctggtggccctgcgtcaggggaagattgtggcgcaatatcagaaactgcatctctatgatgcgttcaatatccaggaatccaggctggtcgatgccgggcggcaaattccgccgctgatcgaagtcgacgggatgcgcgtcgggctgatgacctgctacgatttacgtttccctgagctggcgctgtcgttagcgctcagcggcgcgcagctcatagtgttgcctgccgcgtgggtaaaagggccgctgaaggaacatcactgggcgacgctgctggcggcgcgggcgctggatacaacctgctatattgtcgccgcaggagagtgcgggacgcgtaatatcggtcaaagccgtattatcgaccccttagggacaacgcttgccggggcgggagagcggccgcagttgatttttgccgaactttcagctgattatattcagcaggtacgcgagcgcctgccggtgttgcgcaatcgccgctttgcgccaccgcaattattatga

SEQ ID NO: 31 - DNA, 369 bp, Artificial Sequence
  Synthetic polynucleotide
atggccaataataccactgggttaacccgaattattaaagcggccgggtattcctggaaaggattccgtgcggcgtgggtcaatgaggccgcatttcgtcaggaaggcatcgcggccgttattgccgtggcgatcgcctgctggttggacgtcgatgccatcacgcgggtgctgctcattagctcggtcctgttagtgatgatagttgaaattatcaatagcgcgattgaggcggtggttgaccgtatcggtcccgagcatcatgagctttcggggcgagcgaaagatatgggatcggcggcggtactgctggcgattatcatcgcgctgatcgcgtggggaacgctgctgtgggcgaactaccgctaa

SEQ ID NO: 32 - DNA, 1122 bp, Artificial Sequence
  Synthetic polynucleotide
atgcataaccaggctccgattcaacgtagaaaatcaaaacgaatttacgttgggaatgtgccgattggcgatggcgcccccatcgccgtacagtcgatgacaaacacgcgcaccaccgatgtggcggcgacggtaaatcaaattaaagccctcgagcgcgttggcgcggatatcgtgcgcgtttcggtgccgacgatggatgcggcggaagcgttcaaacttatcaaacagcaggttaacgtcccgctggttgccgatatccacttcgattaccgcattgcgctgaaggtagcggaatacggcgttgattgcctgcgtattaacccgggcaatatcggcaacgaagagcgtatccgcatggtggtggactgcgctcgcgataaaaatattcctatccgtatcggggtaaacgccggttctctggaaaaagatctccaggaaaaatacggcgaaccgactccgcaggcgctgctggaatcggcaatgcgccatgttgatcatctcgatcgtctcaacttcgatcagtttaaagtcagcgtaaaagcctccgatgtgttcctcgcggttgaatcctatcgcctgttggcgaaacagatcgatcagcctctgcacctcgggatcaccgaagcgggcggcgcgcgcagcggcgcggtgaagtccgcgatcggcctcggcctgctgctgtctgaagggattggcgatacgctgcgcgtctctctggcggcggatcccgttgaagagatcaaagtgggcttcgatattctcaagtcgctgcgtattcgctctcgcgggatcaactttattgcctgcccgacctgttcacgtcaggagtttgacgttatcggtaccgttaacgcgctggagcagcgcctggaagatatcattacgccgatggatatttcgatcattggctgcgtggtaaacggtcccggcgaggcgctggtttccaccctcggcgtaaccggcggcaataagaaaagcggcctgtacgaagacggcgtacgtaaagacaggctggataacgacgatatgatcgatcagctggaagcgcgtattcgcgctaaagcatcgatgctggatgaggcgcgtcgtatcgatatccagcaggttgaagcgaaataa

SEQ ID NO: 33 - DNA, 876 bp, Artificial Sequence
  Synthetic polynucleotide
atgagccatattcaacgggaaacgtcttgctccaggccgcgattaaattccaacatggatgctgatttatatgggtataaatgggctcgcgataatgtcgggcaatcaggtgcgacaatctatcgattgtatgggaagcccgatgcgccagagttgtttctgaaacatggcaaaggtagcgttgccaatgatgttacagatgagatggtcagactaaactggctgacggaatttatgcctcttccgaccatcaagcattttatccgtactcctgatgatgcatggttactcaccactgcgatccccgggaaaacagcattccaggtattagaagaatatcctgattcaggtgaaaatattgttgatgcgctggcagtgttcctgcgccggttgcattcgattcctgtttgtaattgtccttttaacagcgatcgcgtatttcgtctcgctcaggcgcaatcacgaatgaataacggtttggttgatgcgagtgattttgatgacgagcgtaatggctggcctgttgaacaagtctggaaagaaatgcataagcttttgccattctcaccggattcagtcgtcactcatggtgatttctcacttgataaccttatttttgacgaggggaaattaataggttgtattgatgttggacgagtcggaatcgcagaccgataccaggatcttgccatcctatggaactgcctcggtgagttttctccttcattacagaaacggctttttcaaaaatatggtattgataatcctgatatgaataaattgcagtttcatttgatgctcgatgagtttttctaataagcctgcctggttctgcgtttcccgctctttaataccctgaccggaggtgagcaatga

SEQ ID NO: 34 - DNA, 1491 bp, Artificial Sequence
  Synthetic polynucleotide
atgagcatcacggcgttatcagcatcatttcctgaggggaatatcgccagccgcttgtcgctgcaacatccttcactgttttataccgtggttgaacaatcttcggtggcgagcgtgttgagtcatcctgactagctgagatgagggctcgccccctcgtcccgacacttccagatcgccatagcgcacagcgcctcgagcggtggtaacggcgcagtggcggttttcatggcttgttatgactgtttttttggggtacagtctatgcctcgggcatccaagcagcaagcgcgttacgccgtgggtcgatgtttgatgttatggagcagcaacgatgttacgcagcagggcagtcgccctaaaacaaagttaaacatcatgagggaagcggtgatcgccgaagtatcgactcaactatcagaggtagttggcgtcatcgagcgccatctcgaaccgacgttgctggccgtacatttgtacggctccgcagtggatggcggcctgaagccacacagtgatattgatttgctggttacggtgaccgtaaggcttgatgaaacaacgcggcgagctttgatcaacgaccttttggaaacttcggcttcccctggagagagcgagattctccgcgctgtagaagtcaccattgttgtgcacgacgacatcattccgtggcgttatccagctaagcgcgaactgcaatttggagaatggcagcgcaatgacattcttgcaggtatcttcgagccagccacgatcgacattgatctggctatcttgctgacaaaagcaagagaacatagcgttgccttggtaggtccagcggcggaggaactctttgatccggttcctgaacaggatctatttgaggcgctaaatgaaaccttaacgctatggaactcgccgcccgactgggctggcgatgagcgaaatgtagtgcttacgttgtcccgcatttggtacagcgcagtaaccggcaaaatcgcgccgaaggatgtcgctgccgactgggcaatggagcgcctgccggcccagtatcagcccgtcatacttgaagctagacaggcttatcttggacaagaagaagatcgcttggcctcgcgcgcagatcagttggaagaatttgtccactacgtgaaaggcgagatcaccaaggtagtcggcaaataatgtctaacaattcgttcaagccgacgccgcttcgcggcgcggcttaactcaagcgttagatgcactaagcacataattgctcacagccaaactatcaggtcaagtctgcttttattatttttaagcgtgcataataagccctacacaaatggtacccgaccggtggtgaatttaatctcgctgacgtgtagacattcccttatccagacgctgatcgcccatcatcgcggttctttagatctctcggtccgccctgatggcggcaccttgctgacgttacgcctgccggtacagcaggttatcaccggaggcttaaaatga

SEQ ID NO: 35 - DNA, 1021 bp, Artificial Sequence
  Synthetic polynucleotide
ctgatccttcaactcagcaaaagttcgatttattcaacaaagccacgttgtgtctcaaaatctctgatgttacattgcacaagataaaaatatatcatcatgaacaataaaactgtctgcttacataaacagtaatacaaggggtgttatgagccatattcaacgggaaacgtcttgctccaggccgcgattaaattccaacatggatgctgatttatatgggtataaatgggctcgcgataatgtcgggcaatcaggtgcgacaatctatcgattgtatgggaagcccgatgcgccagagttgtttctgaaacatggcaaaggtagcgttgccaatgatgttacagatgagatggtcagactaaactggctgacggaatttatgcctcttccgaccatcaagcattttatccgtactcctgatgatgcatggttactcaccactgcgatccccgggaaaacagcattccaggtattagaagaatatcctgattcaggtgaaaatattgttgatgcgctggcagtgttcctgcgccggttgcattcgattcctgtttgtaattgtccttttaacagcgatcgcgtatttcgtctcgctcaggcgcaatcacgaatgaataacggtttggttgatgcgagtgattttgatgacgagcgtaatggctggcctgttgaacaagtctggaaagaaatgcataagcttttgccattctcaccggattcagtcgtcactcatggtgatttctcacttgataaccttatttttgacgaggggaaattaataggttgtattgatgttggacgagtcggaatcgcagaccgataccaggatcttgccatcctatggaactgcctcggtgagttttctccttcattacagaaacggctttttcaaaaatatggtattgataatcctgatatgaataaattgcagtttcatttgatgctcgatgagtttttctaataagccttgaccctacgattcccgctatttcattcactgaccggaggttcaaaatga

SEQ ID NO: 36 - DNA, 1071 bp, Artificial Sequence
  Synthetic polynucleotide
atgaagatagcaacaatgaaaacaggtctgggagcgttggctcttcttccctgatccttcaactcagcaaaagttcgatttattcaacaaagccacgttgtgtctcaaaatctctgatgttacattgcacaagataaaaatatatcatcatgaacaataaaactgtctgcttacataaacagtaatacaaggggtgttatgagccatattcaacgggaaacgtcttgctcccgtccgcgcttaaactccaacatggacgctgatttatatgggtataaatgggctcgcgataatgtcgggcaatcaggtgcgacaatctatcgcttgtatgggaagcccgatgcgccagagttgtttctgaaacatggcaaaggtagcgttgccaatgatgttacagatgagatggtccgtctcaactggctgacggagtttatgcctctcccgaccatcaagcattttatccgtactcctgatgatgcgtggttactcaccaccgcgattcctgggaaaacagccttccaggtattagaagaatatcctgattcaggtgaaaatattgttgatgcgctggccgtgttcctgcgccggttacattcgattcctgtttgtaattgtccttttaacagcgatcgtgtatttcgtcttgctcaggcgcaatcacgcatgaataacggtttggttgatgcgagtgattttgatgacgagcgtaatggctggcctgttgaacaagtctggaaagaaatgcacaagctcttgccattctcaccggattcagtcgtcactcatggtgatttctcacttgataaccttatttttgacgaggggaaattaataggttgtattgatgttggacgggtcggaatcgcagaccgttaccaggaccttgccattctttggaactgcctcggtgagttttctccttcattacagaaacggctttttcaaaaatatggtattgataatcctgatatgaataaattgcagtttcatttgatgctcgatgagtttttctaataagcctgtgaagggctggacgtaaacagccacggcgaaaacgcctacaacgcctga

SEQ ID NO: 37 - DNA, 1071 bp, Artificial Sequence
  Synthetic polynucleotide
atgaccctgaatatgatgctcgataacgccgtacccgaggcgattgccggctgatccttcaactcagcaaaagttcgatttattcaacaaagccacgttgtgtctcaaaatctctgatgttacattgcacaagataaaaatatatcatcatgaacaataaaactgtctgcttacataaacagtaatacaaggggtgttatgagccatattcaacgggaaacgtcttgctcccgtccgcgcttaaactccaacatggacgctgatttatatgggtataaatgggctcgcgataatgtcgggcaatcaggtgcgacaatctatcgcttgtatgggaagcccgatgcgccagagttgtttctgaaacatggcaaaggtagcgttgccaatgatgttacagatgagatggtccgtctcaactggctgacggagtttatgcctctcccgaccatcaagcattttatccgtactcctgatgatgcgtggttactcaccaccgcgattcctgggaaaacagccttccaggtattagaagaatatcctgattcaggtgaaaatattgttgatgcgctggccgtgttcctgcgccggttacattcgattcctgtttgtaattgtccttttaacagcgatcgtgtatttcgtcttgctcaggcgcaatcacgcatgaataacggtttggttgatgcgagtgattttgatgacgagcgtaatggctggcctgttgaacaagtctggaaagaaatgcacaagctcttgccattctcaccggattcagtcgtcactcatggtgatttctcacttgataaccttatttttgacgaggggaaattaataggttgtattgatgttggacgggtcggaatcgcagaccgttaccaggaccttgccattctttggaactgcctcggtgagttttctccttcattacagaaacggctttttcaaaaatatggtattgataatcctgatatgaataaattgcagtttcatttgatgctcgatgagtttttctaataagccttggttctgcgtttcccgctctttaataccctgaccggaggtgagcaatga

SEQ ID NO: 38 - DNA, 426 bp, Artificial Sequence
  Synthetic polynucleotide
atgaccctgaatatgatgatggatgccggcggacatcatcgcgacaaacaatattaataccggcaaccacaccggcaatttacgagactgcgcaggcatcctttctcccgtcaatttctgtcaaataaagtaaaagaggcagtctacttgaattacccccggctggttgagcgtttgttgaaaaaaagtaactgaaaaatccgtagaatagcgccactctgatggttaattaacctattcaattaagaattatctggatgaatgtgccattaaatgcgcagcataatggtgcgttgtgcgggaaaactgcttttttttgaaagggttggtcagtagcggaaacaactcacttcacaccccgaagggggaagttgcctgaccctacgattcccgctatttcattcactgaccggaggttcaaaatga

SEQ ID NO: 39 - DNA, 446 bp, Artificial Sequence
  Synthetic polynucleotide
atgaccctgaatatgatgatggatgccggctcaccacggcgataaccataggttttcggcgtggccacatccatggtgaatcccactttttccagcacgcgcgccacttcatcgggtcttaaatacatagattttcctcgtcatctttccaaagcctcgccaccttacatgactgagcatggaccgtgactcagaaaattccacaaacgaacctgaaaggcgtgattgccgtctggccttaaaaattatggtctaaactaaaatttacatcgaaaacgagggaggatcctatgtttaacaaaccgaatcgccgtgacgtagatgaaggtgttgaggatattaaccacgatgttaaccagctcgaactcacttcacaccccgaagggggaagttgcctgaccctacgattcccgctatttcattcactgaccggaggttcaaaatga

SEQ ID NO: 40 - DNA, 452 bp, Artificial Sequence
  Synthetic polynucleotide
atgaccctgaatatgatgatggatgccggctgacgaggcaggttacatcactggtgaaaccctgcacgtcaatggcggaatgtatatggtttaaccacgatgaaaattatttgcgttattagggcgaaaggcctcaaaatagcgtaaaatcgtggtaagaactgccgggatttagttgcaaatttttcaacattttatacactacgaaaaccatcgcgaaagcgagttttgataggaaatttaagagtatgagcactatcgaagaacgcgttaagaaaattatcggcgaacagctgggcgttaagcaggaagaagttaccaacaatgcttccttcgttgaagacctgggcgctgattctcttgacaccgaactcacttcacaccccgaagggggaagttgcctgaccctacgattcccgctatttcattcactgaccggaggttcaaaatga

SEQ ID NO: 41 - DNA, 461 bp, Artificial Sequence
  Synthetic polynucleotide
atgaccctgaatatgatgatggatgccggccgtcctgtaataataaccggacaattcggactgattaaaaaagcgcccttgtggcgctttttttatattcccgcctccatttaaaataaaaaatccaatcggatttcactatttaaactggccattatctaagatgaatccgatggaagctcgctgttttaacacgcgttttttaaccttttattgaaagtcggtgcttctttgagcgaacgatcaaatttaagtggattcccatcaaaaaaatattctcaacctaaaaaagtttgtgtaatacttgtaacgctacatggagattaactcaatctagagggtattaataatgaatcgtactaaactggtactgggcgcaactcacttcacaccccgaagggggaagttgcctgaccctacgattcccgctatttcattcactgaccggaggttcaaaatga

SEQ ID NO: 42 - DNA, 463 bp, Artificial Sequence
  Synthetic polynucleotide
atgaccctgaatatgatgatggatgccggcatattgacaccatgacgcgcgtaatgctgattggttctgtgacgctggtaatgattgtcgaaattctgaacagtgccatcgaagccgtagtagaccgtattggtgcagaattccatgaactttccgggcgggcgaaggatatggggtcggcggcggtgctgatgtccatcctgctggcgatgtttacctggatcgcattactctggtcacattttcgataacgcttccagaattcgataacgccctggttttttgcttaaatttggttccaaaatcgcctttagctgtatatactcacagcataactgtatatacacccagggggcgggatgaaagcattaacggccaggaactcacttcacaccccgaagggggaagttgcctgaccctacgattcccgctatttcattcactgaccggaggttcaaaatga

SEQ ID NO: 43 - DNA, 428 bp, Artificial Sequence
  Synthetic polynucleotide
atgaccctgaatatgatgatggatgccggcatcatattgcgctccctggttatcatttgttactaaatgaaatgttataatataacaattataaataccacatcgctttcaattcaccagccaaatgagaggagcgccgtctgacatagccagcgctataaaacatagcattatctatatgtttatgattaataactgatttttgcgttttggatttggctgtggcatccttgccgctcttttcgcagcgtctgcgtttttgccctccggtcagggcatttaagggtcagcaatgagtttttacgcaattacgattcttgccttcggcatgtcgatggatgctttaactcacttcacaccccgaagggggaagttgcctgaccctacgattcccgctatttcattcactgaccggaggttcaaaatga

SEQ ID NO: 44 - DNA, 452 bp, Artificial Sequence
  Synthetic polynucleotide
atgaccctgaatatgatgatggatgccggccgcgtcaggttgaacgtaaaaaagtcggtctgcgcaaagcacgtcgtcgtccgcagttctccaaacgttaattggtttctgcttcggcagaacgattggcgaaaaaacccggtgcgaaccgggtttttttatggataaagatcgtgttatccacagcaatccattgattatctcttctttttcagcatttccagaatcccctcaccacaaagcccgcaaaatctggtaaactatcatccaattttctgcccaaatggctgggattgttcattttttgtttgccttacaacgagagtgacagtacgcgcgggtagttaactcaacatctgaccggtcgataactcacttcacaccccgaagggggaagttgcctgaccctacgattcccgctatttcattcactgaccggaggttcaaaatga

SEQ ID NO: 45 - DNA, 410 bp, Artificial Sequence
  Synthetic polynucleotide
atgaccctgaatatgatgatggatgccggccctgtatgaagatggcgtgcgcaaagatcgcctggataacagcgatatgattagccagcttgaagcccgcattcgcgcgaaagcgtcaatgctggacgaagcgcgtcgtatcgatgtgcaacaggtagaaaaataaggttgctgggaagcggcaggcttcccgtgtatgatgaacccgcccggcgcgacccgttgttcgtcgcggccccgagggttcattttttgtattaataaagagaataaacgtggcaaaaaatattcaagccattcgcggcatgaacgattatctgcctggcgaactcacttcacaccccgaagggggaagttgcctgaccctacgattcccgctatttcattcactgaccggaggttcaaaatga

SEQ ID NO: 46 - DNA, 1071 bp, Artificial Sequence
  Synthetic polynucleotide
atgaaaaagattgatgcgattattaaacctttcaaactggatgacgtgcgctgatccttcaactcagcaaaagttcgatttattcaacaaagccacgttgtgtctcaaaatctctgatgttacattgcacaagataaaaatatatcatcatgaacaataaaactgtctgcttacataaacagtaatacaaggggtgttatgagccatattcaacgggaaacgtcttgctcccgtccgcgcttaaactccaacatggacgctgatttatatgggtataaatgggctcgcgataatgtcgggcaatcaggtgcgacaatctatcgcttgtatgggaagcccgatgcgccagagttgtttctgaaacatggcaaaggtagcgttgccaatgatgttacagatgagatggtccgtctcaactggctgacggagtttatgcctctcccgaccatcaagcattttatccgtactcctgatgatgcgtggttactcaccaccgcgattcctgggaaaacagccttccaggtattagaagaatatcctgattcaggtgaaaatattgttgatgcgctggccgtgttcctgcgccggttacattcgattcctgtttgtaattgtccttttaacagcgatcgtgtatttcgtcttgctcaggcgcaatcacgcatgaataacggtttggttgatgcgagtgattttgatgacgagcgtaatggctggcctgttgaacaagtctggaaagaaatgcacaagctcttgccattctcaccggattcagtcgtcactcatggtgatttctcacttgataaccttatttttgacgaggggaaattaataggttgtattgatgttggacgggtcggaatcgcagaccgttaccaggaccttgccattctttggaactgcctcggtgagttttctccttcattacagaaacggctttttcaaaaatatggtattgataatcctgatatgaataaattgcagtttcatttgatgctcgatgagtttttctaataagcctcgcgcgtgattcgtatccgcaccggcgaagaagacgacgcggcgatttaa

SEQ ID NO: 47 - DNA, 1295 bp, Artificial Sequence
  Synthetic polynucleotide
atgaccatgaacctgatgacggatgtcgtctcagccaccgggatcgccgggttgctttcacgacaacacccgacgctgttttttacactaattgaacaggcccccgtggcgatcacgctgacggataccgctgcccgcattgtctatgccaacccgggcgtgttgagtcatcctgactagctgagatgagggctcgcctgatccttcaactcagcaaaagttcgatttattcaacaaagccacgttgtgtctcaaaatctctgatgttacattgcacaagataaaaatatatcatcatgaacaataaaactgtctgcttacataaacagtaatacaaggggtgttatgagccatattcaacgggaaacgtcttgctccaggccgcgattaaattccaacatggatgctgatttatatgggtataaatgggctcgcgataatgtcgggcaatcaggtgcgacaatctatcgattgtatgggaagcccgatgcgccagagttgtttctgaaacatggcaaaggtagcgttgccaatgatgttacagatgagatggtcagactaaactggctgacggaatttatgcctcttccgaccatcaagcattttatccgtactcctgatgatgcatggttactcaccactgcgatccccgggaaaacagcattccaggtattagaagaatatcctgattcaggtgaaaatattgttgatgcgctggcagtgttcctgcgccggttgcattcgattcctgtttgtaattgtccttttaacagcgatcgcgtatttcgtctcgctcaggcgcaatcacgaatgaataacggtttggttgatgcgagtgattttgatgacgagcgtaatggctggcctgttgaacaagtctggaaagaaatgcataagcttttgccattctcaccggattcagtcgtcactcatggtgatttctcacttgataaccttatttttgacgaggggaaattaataggttgtattgatgttggacgagtcggaatcgcagaccgataccaggatcttgccatcctatggaactgcctcggtgagttttctccttcattacagaaacggctttttcaaaaatatggtattgataatcctgatatgaataaattgcagtttcatttgatgctcgatgagtttttctaataagcctgaccggtggtgaatttaatctcgctgacgtgtagacattcatcgatctgcatccacggtccggcggcggtacctgcctgacgctacgtttaccgctcttttatgaactgaccggaggcccaagatga

SEQ ID NO: 48 - DNA, 1491 bp, Artificial Sequence; identical to SEQ ID NO: 34
  Synthetic polynucleotide

SEQ ID NO: 49 - DNA, 1021 bp, Artificial Sequence; identical to SEQ ID NO: 35
  Synthetic polynucleotide

SEQ ID NO: 50 - DNA, 1071 bp, Artificial Sequence; identical to SEQ ID NO: 37
  Synthetic polynucleotide

SEQ ID NO: 51 - DNA, 461 bp, Artificial Sequence; identical to SEQ ID NO: 41
  Synthetic polynucleotide

SEQ ID NO: 52 - DNA, 426 bp, Artificial Sequence; identical to SEQ ID NO: 38
  Synthetic polynucleotide

SEQ ID NO: 53 - DNA, 452 bp, Artificial Sequence; identical to SEQ ID NO: 40
  Synthetic polynucleotide

SEQ ID NO: 54 - DNA, 426 bp, Artificial Sequence; identical to SEQ ID NO: 38
  Synthetic polynucleotide

SEQ ID NO: 55 - DNA, 461 bp, Artificial Sequence; identical to SEQ ID NO: 41
  Synthetic polynucleotide

SEQ ID NO: 56 - DNA, 1491 bp, Artificial Sequence; identical to SEQ ID NO: 34
  Synthetic polynucleotide

SEQ ID NO: 57 - DNA, 1491 bp, Artificial Sequence; identical to SEQ ID NO: 34
  Synthetic polynucleotide

SEQ ID NO: 58 - DNA, 1021 bp, Artificial Sequence; identical to SEQ ID NO: 35
  Synthetic polynucleotide

SEQ ID NO: 59 - DNA, 1491 bp, Artificial Sequence; identical to SEQ ID NO: 34
  Synthetic polynucleotide

SEQ ID NO: 60 - DNA, 1491 bp, Artificial Sequence; identical to SEQ ID NO: 34
  Synthetic polynucleotide

SEQ ID NO: 61 - DNA, 1563 bp, Artificial Sequence
  Synthetic polynucleotide
atgtttaacgatctgattggcgatgatgaaacggattcgccggaagatgcgctttctgagagctggcgcgaattgtggcaggatgcgttgcaggaggaggattccacgcccgtgctggcgcatctctcagaggacgatcgccgccgcgtggtggcgctgattgccgattttcgcaaagagttggataaacgcaccattggcccgcgagggcggcaggtactcgatcacttaatgccgcatctgctcagcgatgtatgctcgcgcgacgatgcgccagtaccgctgtcacgcctgacgccgctgctcaccggaattattacccgcaccacttaccttgagctgctaagtgaatttcccggcgcactgaaacacctcatttccctgtgtgccgcgtcgccgatggttgccagtcagctggcgcgctacccgatcctgcttgatgaattgctcgacccgaatacgctctatcaaccgacggcgatgaatgcctatcgcgatgagctgcgccaatacctgctgcgcgtgccggaagatgatgaagagcaacagcttgaggcgctgcggcagtttaagcaggcgcagttgctgcgcgtggcggcggcggatattgccggtacgttgccagtaatgaaagtgagcgatcacttaacctggctggcggaagcgattattgatgcggtggtgcagcaagcctgggggcagatggtggcgcgttatggccagccaacgcatctgcacgatcgcgaagggcgcggttttgcggtggtcggttatggcaagctgggcggctgggagctgggttacagctccgatctggatctggtattcctgcacgactgcccgatggatgtgatgaccgatggcgagcgtgaaatcgatggtcgccagttctatttgcgtctcgcgcagcgcgtgatgcacctgtttagcacgcgcacgtcgtccggcatcctttatgaagttgatgcgcgtctgcgtccatctggcgctgcggggatgctggtcactactacggaatcgttcgccgattaccagcaaaacgaagcctggacgtgggaacatcaggcgctggcccgtgcgcgcgtggtgtacggcgatccgcaactgaccgccgaatttgacgccattcgccgcgatattctgatgacgcctcgcgacggcgcaacgctgcaaaccgacgtgcgagaaatgcgcgagaaaatgcgtgcccatcttggcaacaagcataaagaccgcttcgatctgaaagccgatgaaggcggtatcaccgacatcgagtttatcgcccaatatctggtgctgcgctttgcccatgacaagccgaaactgacgcgctggtcggataatgtgcgcattctcgaagggctggcgcaaaacggcatcatggaggagcaggaagcgcaggcattgacgctggcgtacaccacattgcgtgatgagctgcaccacctggcgctgcaagagttgccgggacatgtggcgctctcctgttttgtcgccgagcgtgcgcttattaaaaccagctgggacaagtggctggtggaaccgtgcgccccggcgtaa

SEQ ID NO: 62 - DNA, 1536 bp, Kosakonia sacchari
  source (1)..(1536): 16S rDNA - contig 5, strain CI006
ttgaagagtttgatcatggctcagattgaacgctggcggcaggcctaacacatgcaagtcgaacggtagcacagagagcttgctctcgggtgacgagtggcggacgggtgagtaatgtctgggaaactgcctgatggagggggataactactggaaacggtagctaataccgcataacgtcgcaagaccaaagagggggaccttcgggcctcttgccatcagatgtgcccagatgggattagctagtaggtggggtaacggctcacctaggcgacgatccctagctggtctgagaggatgaccagccacactggaactgagacacggtccagactcctacgggaggcagcagtggggaatattgcacaatgggcgcaagcctgatgcagccatgccgcgtgtgtgaagaaggccttcgggttgtaaagcactttcagcggggaggaagggagtaaggttaataaccttattcattgacgttacccgcagaagaagcaccggctaactccgtgccagcagccgcggtaatacggagggtgcaagcgttaatcggaattactgggcgtaaagcgcacgcaggcggtctgtcaagtcggatgtgaaatccccgggctcaacctgggaactgcatccgaaactggcaggcttgagtctcgtagagggaggtagaattccaggtgtagcggtgaaatgcgtagagatctggaggaataccggtggcgaaggcggcctcctggacgaagactgacgctcaggtgcgaaagcgtggggagcaaacaggattagataccctggtagtccacgccgtaaacgatgtctatttggaggttgtgcccttgaggcgtggcttccggagctaacgcgttaaatagaccgcctggggagtacggccgcaaggttaaaactcaaatgaattgacgggggcccgcacaagcggtggagcatgtggtttaattcgatgcaacgcgaagaaccttacctggtcttgacatccacagaactttccagagatggattggtgccttcgggaactgtgagacaggtgctgcatggctgtcgtcagctcgtgttgtgaaatgttgggttaagtcccgcaacgagcgcaacccttatcctttgttgccagcggtccggccgggaactcaaaggagactgccagtgataaactggaggaaggtggggatgacgtcaagtcatcatggcccttacgaccagggctacacacgtgctacaatggcgcatacaaagagaagcgacctcgcgagagtaagcggacctcataaagtgcgtcgtagtccggattggagtctgcaactcgactccatgaagtcggaatcgctagtaatcgtggatcagaatgccacggtgaatacgttcccgggccttgtacacaccgcccgtcacaccatgggagtgggttgcaaaagaagtaggtagcttaaccttcgggagggcgcttaccactttgtgattcatgactggggtgaagtcgtaacaaggtaaccgtaggggaacctgcggttggatcacctcctt

SEQ ID NO: 63 - DNA, 1537 bp, Kosakonia sacchari
  gene (1)..(1537): 16S rDNA - contig 8, strain CI006
  misc_feature (450)..(450): n is a, c, g, or t
  misc_feature (452)..(452): n is a, c, g, or t
  misc_feature (455)..(455): n is a, c, g, or t
  misc_feature (473)..(473): n is a, c, g, or t
ttgaagagtttgatcatggctcagattgaacgctggcggcaggcctaacacatgcaagtcgaacggtagcacagagagcttgctctcgggtgacgagtggcggacgggtgagtaatgtctgggaaactgcctgatggagggggataactactggaaacggtagctaataccgcataacgtcgcaagaccaaagagggggaccttcgggcctcttgccatcagatgtgcccagatgggattagctagtaggtggggtaacggctcacctaggcgacgatccctagctggtctgagaggatgaccagccacactggaactgagacacggtccagactcctacgggaggcagcagtggggaatattgcacaatgggcgcaagcctgatgcagccatgccgcgtgtgtgaagaaggccttcgggttgtaaagcactttcagcggggaggaaggnantanggttaataacctgtgttnattgacgttacccgcagaagaagcaccggctaactccgtgccagcagccgcggtaatacggagggtgcaagcgttaatcggaattactgggcgtaaagcgcacgcaggcggtctgtcaagtcggatgtgaaatccccgggctcaacctgggaactgcatccgaaactggcaggcttgagtctcgtagagggaggtagaattccaggtgtagcggtgaaatgcgtagagatctggaggaataccggtggcgaaggcggcctcctggacgaagactgacgctcaggtgcgaaagcgtggggagcaaacaggattagataccctggtagtccacgccgtaaacgatgtctatttggaggttgtgcccttgaggcgtggcttccggagctaacgcgttaaatagaccgcctggggagtacggccgcaaggttaaaactcaaatgaattgacgggggcccgcacaagcggtggagcatgtggtttaattcgatgcaacgcgaagaaccttacctggtcttgacatccacagaacttagcagagatgctttggtgccttcgggaactgtgagacaggtgctgcatggctgtcgtcagctcgtgttgtgaaatgttgggttaagtcccgcaacgagcgcaacccttatcctttgttgccagcggttaggccgggaactcaaaggagactgccagtgataaactggaggaaggtggggatgacgtcaagtcatcatggcccttacgaccagggctacacacgtgctacaatggcgcatacaaagagaagcgacctcgcgagagtaagcggacctcataaagtgcgtcgtagtccggattggagtctgcaactcgactccatgaagtcggaatcgctagtaatcgtggatcagaatgccacggtgaatacgttcccgggccttgtacacaccgcccgtcacaccatgggagtgggttgcaaaagaagtaggtagcttaaccttcgggagggcgcttaccactttgtgattcatgactggggtgaagtcgtaacaaggtaaccgtaggggaacctgcggttggatcacctcctt

SEQ ID NO: 64 - DNA, 1540 bp, Unknown
  Rahnella sp.
  gene (1)..(1540): 16S rDNA, strain CI019
  misc_feature (70)..(70): n is a, c, g, or t
  misc_feature (267)..(267): n is a, c, g, or t
  misc_feature (455)..(455): n is a, c, g, or t
  misc_feature (458)..(458): n is a, c, g, or t
  misc_feature (473)..(473): n is a, c, g, or t
  misc_feature (1135)..(1135): n is a, c, g, or t
attgaagagtttgatcatggctcagattgaacgctggcggcaggcctaacacatgcaagtcgagcggcancgggaagtagcttgctactttgccggcgagcggcggacgggtgagtaatgtctgggaaactgcctgatggagggggataactactggaaacggtagctaataccgcatgacctcgaaagagcaaagtgggggatcttcggacctcacgccatcggatgtgcccagatgggattagctagtaggtgaggtaatggctnacctaggcgacgatccctagctggtctgagaggatgaccagccacactggaactgagacacggtccagactcctacgggaggcagcagtggggaatattgcacaatgggcgcaagcctgatgcagccatgccgcgtgtgtgaagaaggccttagggttgtaaagcactttcagcgaggaggaaggcancanacttaatacgtgtgntgattgacgttactcgcagaagaagcaccggctaactccgtgccagcagccgcggtaatacggagggtgcaagcgttaatcggaattactgggcgtaaagcgcacgcaggcggtttgttaagtcagatgtgaaatccccgagcttaacttgggaactgcatttgaaactggcaagctagagtcttgtagaggggggtagaattccaggtgtagcggtgaaatgcgtagagatctggaggaataccggtggcgaaggcggccccctggacaaagactgacgctcaggtgcgaaagcgtggggagcaaacaggattagataccctggtagtccacgctgtaaacgatgtcgacttggaggttgtgcccttgaggcgtggcttccggagctaacgcgttaagtcgaccgcctggggagtacggccgcaaggttaaaactcaaatgaattgacgggggcccgcacaagcggtggagcatgtggtttaattcgatgcaacgcgaagaaccttacctactcttgacatccagagaatttgccagagatggcgaagtgccttcgggaactctgagacaggtgctgcatggctgtcgtcagctcgtgttgtgaaatgttgggttaagtcccgcaacgagcgcaacccttatcctttgttgccagcacgtnatggtgggaactcaaaggagactgccggtgataaaccggaggaaggtggggatgacgtcaagtcatcatggcccttacgagtagggctacacacgtgctacaatggcatatacaaagagaagcgaactcgcgagagcaagcggacctcataaagtatgtcgtagtccggattggagtctgcaactcgactccatgaagtcggaatcgctagtaatcgtagatcagaatgctacggtgaatacgttcccgggccttgtacacaccgcccgtcacaccatgggagtgggttgcaaaagaagtaggtagcttaaccttcgggagggcgcttaccactttgtgattcatgactggggtgaagtcgtaacaaggtaaccgtaggggaacctgcggttggatcacctcctt

SEQ ID NO: 65 - DNA, 882 bp, Kosakonia sacchari
  gene (1)..(882): nifH, strain CI006
atgaccatgcgtcaatgcgccatttacggcaaaggtgggatcggcaaatcgaccaccacacagaacctggtcgccgcgctggcggagatgggtaaaaaagtcatgattgtcggctgtgacccgaaagccgattccacgcgtttgatcctgcatgcgaaagcgcagaacaccattatggagatggctgctgaagtcggctccgtggaagacctggagttagaagacgtgctgcaaatcggttacggcggcgtgcgctgcgcagagtccggcggcccggagccaggcgtgggctgtgccggtcgcggggtgatcaccgcgattaacttcctcgaagaagaaggcgcttacgtgccggatctcgattttgttttctacgacgtgctgggcgacgtggtatgcggtggtttcgccatgccgattcgtgaaaacaaagcgcaggagatctacatcgtttgctctggcgaaatgatggcgatgtacgccgccaacaacatctccaaaggcatcgtgaaatacgccaaatccggtaaagtgcgcctcggcgggctgatttgtaactcgcgccagaccgaccgtgaagatgaactgatcattgcgctggcagaaaaactcggcacgcagatgatccactttgttccccgcgacaacattgtgcagcgtgcggaaatccgccgtatgacggttatcgaatatgacccgacctgcaatcaggcgaacgaatatcgcagccttgccagcaaaatcgtcaacaacaccaaaatggtggtgcccaccccctgcaccatggatgaactggaagaactgctgatggagttcggcattatggatgtggaagacaccagcatcattggtaaaaccgccgccgaagaaaacgccgtctga

SEQ ID NO: 66 - DNA, 1449 bp, Kosakonia sacchari
  gene (1)..(1449): NifD, strain CI006
atgagcaatgcaacaggcgaacgcaacctggagataatcgagcaggtgctcgaggttttcccggagaagacgcgcaaagaacgcagaaaacacatgatggtgacggacccggagcaggaaagcgtcggtaagtgcatcatctctaaccgcaaatcgcagccaggcgtgatgaccgtgcgcggctgctcgtatgccggttcgaaaggggtggtatttgggccaatcaaggatatggcgcatatctcgcatggcccaatcggctgcggccaatactcccgcgccgggcggcggaactactacaccggcgtcagcggcgtggacagcttcggcacgctcaacttcacctccgattttcaggagcgcgacatcgtgtttggcggcgataaaaagctcgccaaactgattgaagagctggaagagctgttcccgctgaccaaaggcatttcgattcagtcggaatgcccggtcggcctgattggcgatgacattgaggccgtcgcgaacgccagccgcaaagccatcaacaaaccggttattccggtgcgttgcgaaggctttcgcggcgtgtcgcaatccctcggtcaccatattgccaacgatgtgatccgcgactgggtgctggataaccgcgaaggcaaaccgttcgaatccaccccttacgatgtggcgatcatcggcgattacaacatcggcggcgatgcctgggcttcgcgcattttgctcgaagagatgggcttgcgggtggtggcacagtggtctggcgacggtacgctggtggagatggaaaacacgccgttcgtcaaactgaacctggtgcattgttaccgctcaatgaactacatctcgcgccatatggaggagaagcacggtattccgtggatggaatacaacttctttggtccgacgaaaatcgcggaatcgctgcgcaaaatcgccgaccagtttgacgacaccattcgcgccaacgccgaagcggtgatcgccagataccaggcgcaaaacgacgccattatcgccaaatatcgcccgcgtctggaggggcgcaaagtgctgctttatatgggcgggctgcgtccgcgccatgtgattggcgcctatgaagacctgggaatggagatcatcgctgccggttatgagttcggtcataacgatgattacgaccgcaccttgccggatctgaaagagggcacgctgctgtttgatgatgccagcagttatgagctggaggcgttcgtcaacgcgctgaaaccggatctcatcggttccggcatcaaagagaagtacatctttcagaaaatgggcgtgccgtttcgccagatgcactcctgggattactccggcccgtaccacggctatgacggcttcgccatcttcgcccgcgatatggatatgacgctcaacaaccccgcgtggggccagttgaccgcgccgtggctgaaatccgcctga

SEQ ID NO: 67 - DNA, 1563 bp, Kosakonia sacchari
  gene (1)..(1563): nifK, strain CI006
atgagccagactgctgagaaaatacagaattgccatcccctgtttgaacaggatgcttaccagacgctgtttgccggtaaacgggcactcgaagaggcgcactcgccggagcgggtgcaggaagtgtttcaatggaccactaccccggaatatgaagcgctgaactttaaacgcgaagcgctgactatcgacccggcaaaagcctgccagccgctgggcgcggtgctctgttcgctggggtttgccaataccctaccgtatgtgcacggttcacagggttgcgtggcctatttccgcacgtactttaaccgccactttaaagaaccggtggcctgcgtgtcggattcaatgacggaagacgcggcggtgttcggcgggaataacaacctcaacaccggcttacaaaacgccagcgcgctgtataaaccggagattatcgccgtctctaccacctgtatggcggaagtgatcggtgatgatttgcaggcctttatcgccaacgccaaaaaagatggttttctcgatgccgccatccccgtgccctacgcgcacacccccagttttatcggcagccatatcaccggctgggataacatgtttgaaggttttgcccggacctttacggcagaccatgaagctcagcccggcaaactttcacgcatcaacctggtgaccgggtttgaaacctatctcggcaatttccgcgtgctgaaacgcatgatggaacaaatggaggtgccggcgagtgtgctctccgatccgtcggaagtgctggatactcccgccaacgggcattaccagatgtacgcgggcgggacgacgcagcaagagatgcgcgaggcgccggatgctatcgacaccctgttgctgcagccctggcaactggtgaaaagcaaaaaagtggtgcaggagatgtggaatcagcccgccaccgaggtttctgttcccgttgggctggcaggaacagacgaactgttgatggcgattagccagttaaccggcaaggccattcccgattcactggcgctggagcgcgggcggctggtcgatatgatgctcgattcccacacctggttgcacggtaaaaaattcggcctgtttggcgatccggattttgtcatgggattgacccgtttcctgctggagctgggctgcgaaccgaccgttatcctctgccacaacggtaacaaacgctggcagaaagcaatgaagaaaatgcttgacgcctcgccgtacggccaggagagcgaagtgtttatcaactgcgatttgtggcatttccgctcgctgatgtttacccgccagccggattttatgattggcaactcgtacggcaagttcattcagcgcgacaccttagccaaaggcgagcagtttgaagttccgctgatccgcctcggttttcccctgttcgaccgccaccatctgcaccgccagaccacctggggctacgagggcgccatgagcattctcactacccttgtgaatgcggtactggagaaagtggacaaagagaccatcaagctcggcaaaaccgactacagcttcgatcttatccgttaa

SEQ ID NO: 68 - DNA, 1488 bp, Kosakonia sacchari
  gene (1)..(1488): nifL, strain CI006
atgaccctgaatatgatgatggatgccggcgcgcccgaggcaatcgccggtgcgctttcgcgacaccatcctgggctgttttttaccatcgttgaagaagcgcccgtcgccatttcgctgactgatgccgacgcacgcattgtctatgccaacccggctttctgccgccagaccggctatgaactagaagcgttgttgcagcaaaatccccgcctgcttgcaagtcgccaaaccccacgggaaatctatcaggatatgtggcacaccttgttacaacgccgaccgtggcgcgggcaattgattaaccgccaccgcgacggcagcctgtatctggtcgagatcgatatcaccccggtgattaacccgtttggcgaactggaacactacctggcaatgcagcgcgatatcagcgccagttatgcgctggagcagcggttgcgcaatcacatgacgctgaccgaagcggtgctgaataacattccggcggcggtggttgtagtggatgaacgcgatcatgtggttatggataaccttgcctacaaaacgttctgtgccgactgcggcggaaaagagctcctgagcgaactcaatttttcagcccgaaaagcggagctggcaaacggccaggtcttaccggtggtgctgcgcggtgaggtgcgctggttgtcggtgacctgctgggcgctgccgggcgtcagcgaagaagccagtcgctactttattgataacaggctgacgcgcacgctggtggtgatcaccgacgacacccaacaacgccagcagcaggaacagggccgacttgaccgccttaaacagcagatgaccaacggcaaactactggcagcgatccgcgaagcgcttgacgccgcgctgatccagcttaactgccccatcaatatgctggcggcggcgcgacgtttaaacggcagtgataacaacaatgtggcgctcgacgccgcgtggcgcgaaggtgaagaggcgatggcgcggctgaaacgttgccgcccgtcgctggaactggaaagtgcggccgtctggccgctgcaacccttttttgacgatctgcgcgcgctttatcacacccgctacgagcaggggaaaaatttgcaggtcacgctggattcccatcatctggtgggatttggtcagcgtacgcaactgttagcctgcctgagtctgtggctcgatcgcacgctggatattgccgccgggctgggtgatttcaccgcgcaaacgcagatttacgcccgcgaagaagagggctggctctctttgtatatcactgacaatgtgccgctgatcccgctgcgccacacccactcgccggatgcgcttaacgctccgggaaaaggcatggagctgcgcctgatccagacgctggtggcacaccaccacggcgcaatagaactcacttcacaccccgaagggggaagttgcctgaccctacgattcccgctatttcattcactgaccggaggttcaaaatga

SEQ ID NO: 69 - DNA, 1575 bp, Kosakonia sacchari
  gene (1)..(1575): nifA, strain CI006
atgacccagcgaaccgagtcgggtaataccgtctggcgcttcgatttgtcccagcagttcactgcgatgcagcgcataagcgtggtactcagccgggcgaccgaggtcgatcagacgctccagcaagtgctgtgcgtattgcacaatgacgcctttttgcagcacggcatgatctgtctgtacgacagccagcaggcgattttgaatattgaagcgttgcaggaagccgatcagcagttaatccccggcagctcgcaaatccgctatcgtccgggcgaagggctggtcgggacggtgctttcgcagggccaatcattagtgctggcgcgcgttgctgacgatcagcgctttcttgaccggctcgggttgtatgattacaacctgccgtttatcgccgtgccgctgatagggccagatgcgcagactttcggtgtgctgacggcacaacccatggcgcgttacgaagagcgattacccgcctgcacccgctttctggaaacggtcgctaacctggtcgcgcaaaccgtgcgtttgatggcaccaccggcagtgcgcccttccccgcgcgccgccataacacaggccgccagcccgaaatcctgcacggcctcacgcgcatttggttttgaaaatatggtcggtaacagtccggcgatgcgccagaccatggagattatccgtcaggtttcgcgctgggacaccaccgttctggtacgcggcgagagtggcaccggcaaggagctgattgccaacgccatccaccaccattcgccgcgtgccggtgcgccatttgtgaaattcaactgtgcggcgctgccggacacactgctggaaagcgaattgttcggtcacgagaaaggggcatttaccggcgcggtacgccagcgtaaaggccgttttgagctggccgatggcggcacgctgtttcttgacgagatcggcgagagtagcgcctcgtttcaggctaagctgctgcgcattttgcaggaaggcgaaatggaacgcgtcggcggcgacgagacattgcaagtgaatgtgcgcattattgccgcgacgaaccgcaatcttgaagatgaagtccggctggggcactttcgcgaagatctctattatcgcctgaatgtgatgcccatcgccctgccgccactacgcgaacgccaggaggacattgccgagctggcgcactttctggtgcgtaaaatcgcccataaccagagccgtacgctgcgcattagcgagggcgctatccgcctgctgatgagctacaactggcccggtaatgtgcgcgaactggaaaactgccttgagcgctcagcggtgatgtcggagaacggtctgatcgatcgggatgtgattttgtttaatcatcgcgaccagccagccaaaccgccagttatcagcgtctcgcatgatgataactggctcgataacaaccttgacgagcgccagcggctgattgcggcgctggaaaaagcgggatgggtacaagccaaagccgcgcgcttgctggggatgacgccgcgccaggtcgcctatcgtattcagacgatggatataaccctgccaaggctataa

SEQ ID NO: 70 - DNA, 876 bp, Unknown
  Rahnella sp.
  gene (1)..(876): nifH, strain CI019
atggcaatgcgtcaatgtgcaatctacgggaaagggggtattggtaaatccaccactacccaaaaccttgtagcggctctggccgaaatgaataagaaggtcatgatcgtcggctgtgaccctaaggctgattcaacccgcctcattctgcatgcgaaagcacagaacaccatcatggaaatggccgctgaagtgggctccgtggaagatctggagctggaagatgtgatgcaaatcggctatggcggcgtgcgctgtgcggaatcaggcggccctgagcctggtgtgggttgtgccggacgcggggtgatcaccgccatcaacttcctcgaagaagaaggcgcgtatgtgccggatctggatttcgtgttttacgacgtattgggcgatgtggtctgtggcggtttcgcgatgccaattcgcgaaaacaaagcgcaggaaatctacatcgtatgctccggtgaaatgatggcgatgtatgccgccaacaacatttccaaaggcatcgtgaaatacgcgaaatcgggcaaagttcgcctggccgggctgatctgtaactcccgccagacggatcgcgaagatgaactgatcatcgcgctggctgaaaaacttggcacgcaaatgatccacttcgtgccgcgtgacaacattgtgcaacgcgctgaaatccgccgcatgacggtcatcgaatacgacccgacttgtgcgcaggcagatcagtatcgtgcactggcgaacaaaatcgtcaacaacaccaaaatggtggtgccgacaccggtcaccatggatgagctggaagccctgttaatggaatttggcattatggaagaagaagacctgaccatcgtcggtcgtaccgccgccgaagaggcgtga

SEQ ID NO: 71 - DNA, 1449 bp, Unknown
  Rahnella sp.
  gene (1)..(1449): nifD, strain CI019
atgaccagtgaaacacgcgaacgtaacgaggcattgatccaggaagtgctggagatcttccccgagaaggcgcttaaagatcgtaagaaacacatgatgaccaccgacccggcgatggaatctgtcggcaagtgtattgtctcaaaccgcaaatcacagccgggcgtgatgaccgtgcgaggctgcgcttacgccggttccaaaggcgtggtctttggcccgatcaaagacatggcgcatatctcccacggcccggttggttgcggccagtattctcgtgccggacgccgtaactattacaccggctggagcggcgtgaacagctttggcaccctcaacttcaccagtgattttcaggaacgggacatcgtatttggcggcgataaaaagctcgacaaactgatcgacgaactggagatgttgttcccgctgaccaaaggcatttcggtacagtcggaatgtccggtcggtctgatcggcgatgacatttctgccgtcgccaaagccagcagcgccaaaatcggtaagccggtcgtgccggtacgctgcgaggggttccgcggtgtgtcgcaatcgctcggccatcacattgctaacgatgtcatccgcgactgggtgctggataaccgcgaaggcaatgaatttgaaaccacgccttacgacgtggcgattatcggcgactacaacatcggcggtgacgcctgggcctcacgtattctgctcgaagaaatggggctgcgtgtggtggcgcagtggtccggcgacggcacgctggtggagatggaaaacaccccgaaagtcgcactcaatctggtgcactgctaccgctcgatgaactacatctcccgtcatatggaagaaaaacacggcattccgtggatggaatacaacttctttggcccgaccaaaattgcggaatctctgcgcgaaatcgcggcgcgttttgacgataccatccggaaaaacgccgaagcggtgattgaaaaatatcaggcgcaaacgcaggcggtgatcgacaaataccgtccgcgtctggaaggcaaaaaggtgctgttgtatctcggcggtttacgtccgcgccacatcatcggggcgtatgaagatctgggaatggaaatcatcggtaccggctatgaattcggtcataacgatgattacgaccgcaccttaccgatgctcaaagaaggcacgttgctgttcgatgacctgagcagttatgagctggaagcgttcgttaaagcgctgaaaccggatcttgtcgggtcaggcatcaaagaaaaatacattttccagaaaatgggcgtgccgttccgccagatgcactcctgggattattccggcccttatcacggctacgacggtttcggcatttttgcccgtgacatggacatgacgctgaacaatccgggctggagtcagctgaccgccccctggttgaaatcggcctga

SEQ ID NO: 72 - DNA, 1569 bp, Unknown
  Rahnella sp.
  gene (1)..(1569): nifK, strain CI019
atgagtcaagatcttggcaccccaaaatcctgtttcccgctgttcgagcaggatgaataccagagtatgtttacccacaaacgcgcgctggaagaagcacacggcgaggcgaaagtgcgggaagtgtttgaatggaccaccacgcaggaatatcaggatctgaacttctcgcgtgaagcgctgaccgtcgacccggcgaaagcctgccagccgttaggcgcggtactttgcgcgctgggttttgccaacacgttgccgtatgtccacggttcacaaggctgtgtggcgtatttccgtacctattttaatcgtcatttcaaagagccggtggcctgtgtttccgactcaatgaccgaagatgccgccgtttttggcggaaataacaacatgaatgtcggtctggaaaacgccagcgcgctgtacaagccggaaattattgctgtctccaccacctgtatggcggaagtgatcggtgatgacctgcaggcttttatcgccaacgccaaaaaagacggatttgtggatgccggtatgccaatcccgtatgcccatacaccgagttttctgggcagtcatgtcaccggctgggacaacatgtttgaaggcttcgcccgtacctttaccaccgacgccacgcgggaatatcagccgggcaaacttgccaaactgaacgtggtgaccggttttgaaacttatctcggcaactaccgggttattcaccgcatgatgagccagatgggggtcgaatgcagcgtcttgtccgatccgtctgaagtgctcgacaccccggctgacggccaataccgcatgtatgccggcggcaccacgcaaaccgaaatgcgtgatgcaccggatgccatcgacaccttgctgctgcaaccgtggcaattgcagaaaaccaaaaaagtggtgcagggcgactggaatcagccgggcaccgaagtcagtgtaccgattggcctggcggcgaccgatgccttgctgatgacggtaagcgaactgaccggcaaaccgatagctgacacgctggcgactgaacgtggccgtctggtggacatgatgctcgattcccacacctggctgcatggcaagcgtttcggtctctacggtgacccggattttgtgatgggcatgaccgcattcctgctggaactgggctgtgaaccgaccaccattctcagccataacggcaacaaacgctggcagaaagccatgaagaaaatgctggctgattcgccttacgggcaggacagcgaagtgtatgtgaactgcgatctgtggcatttccgctcgctgatgtttacccgtaaaccggactttatgatcggcaactcttacggaaaattcattcagcgtgacacgctggccaaaggcgaacagttcgaagtgccgctgatccgcatcggttttccgatttttgaccggcaccatttgcaccgtcagaccacctggggatacgaaggggcgatgagcatactgacgcaactggtgaatgcggtacttgaacaactggatcgcgaaaccatgaagctcggcaaaaccgactacaacttcgacctgatccgctaa

SEQ ID NO: 73 - DNA, 1488 bp, Unknown
  Rahnella sp.
  gene (1)..(1488): nifL, strain CI019
atgagcatcacggcgttatcagcatcatttcctgaggggaatatcgccagccgcttgtcgctgcaacatccttcactgttttataccgtggttgaacaatcttcggtggcgatttcgctgaccgatccgcaggcgcgcatttgttatgccaatccggcattctgccgccagacgggttttgcacttgagacacttttgggcgagaaccaccgtctgctggccagccagcagacgccgaaacatatctatgacgaaatgtggcgcactttgttgcagggcaaatcctggaacggccaactgatcaaccggcgtaataaccgttcgctttatctggcggatgtcactatcacgcctgttttaggcgcggacgggcaggtggagcattacctcggcatgcacaaagatatcagcgagaaatacgcgctggaacagcggttgcgcaaccacatcaccttgttcacggaggtgctgaacaatattcccgccgccgtggtggtggtggatgagcaggacaatgtggtgatggacaatctggcctacaaaaccctttgcgcggactgcggcggcaaagagctgctggctgaaatgggctatccgcaactcaaagagatgctcaacagtggcgaaccggtgccggtttccatgcgcggcaacgtacgctggttttctttcggtcaatggttattgcagggcgttaatgaagaggccagccgcttttttaccggcattaccgcgccgggaaaactgattgttctgaccgactgcaccgatcagcatcaccggcagcagcagggttatcttgaccggcttaagcaaaaactcaccaacggcaaattattggcggccatccgtgagtcgctcgatgccgcgcttatccagctcaacgggccaatcaatatgctggcggctgcgcgtcgtcttaacggcgaagaaggcaacaacatggcgctggaattcgcctggcgcgaaggcgagcaggcggtgagtcgcttacaggcctgccgtccgtcgctggattttgagccgcaggcagaatggccggtcagtgaattctttgacgatctgagcgcgctgtacgacagccattttctcagtgacggtgaattgcgttacgtggtcatgccatctgatctgcacgctgtcgggcaacgaacgcaaatccttaccgcgctgagcttatggattgatcacacgctgtcacaggcgcaggccatgccgtctctgaagctctcggtgaacattgttgcgaggcaggatgcgagctggttgtgttttgacattaccgataatgtgccgcgtgaacgggtgcgttatgcccgcccggaagcggcgttttcccgtccggggaatggcatggagctgcgccttatccagacgctgatcgcccatcatcgcggttctttagatctctcggtccgccctgatggcggcaccttgctgacgttacgcctgccggtacagcaggttatcaccggaggcttaaaatga

SEQ ID NO: 74 - DNA, 1557 bp, Unknown
  Rahnella sp.
  gene (1)..(1557): nifA, strain CI019
atgacccagttacctaccgcgggcccggttatccggcgctttgatatgtctgcccagtttacggcgctttatcgcatcagcgtggcgctgagtcaggaaagcaacaccgggcgcgcactggcggcgatcctcgaagtgcttcacgatcatgcatttatgcaatacggcatggtgtgtctgtttgataaagaacgcaatgcactctttgtggaatccctgcatggcatcgacggcgaaaggaaaaaagagacccgccatgtccgttaccgcatgggggaaggcgtgatcggcgcggtgatgagccagcgtcaggcgctggtgttaccgcgcatttcagacgatcagcgttttctcgaccgcctgaatatttacgattacagcctgccgttgattggcgtgccgatccccggtgcggataatcagccatcgggcgtgctggtggcacagccgatggcgttgcacgaagaccggctgactgccagtacgcggtttttagaaatggtcgccaatctcatcagccagccactgcgttctgccacgcccccggaatcattgcctgctcaaacgccggtccggtgcagtgttccgcgccagtttggtttcgagcagatggtcgggaaaagtcaggcgatgcgccagacgatggacattttacggcaggtttccaaatgggataccacggttctggtgcgtggtgaaagcggcaccggcaaggaacttatcgccaatgccattcattacaactcaccccgtgcggccgcgccatttgtgaaattcaactgcgccgcgctgccggataacctgctggaaagcgaactgttcggtcatgaaaaaggggccttcaccggcgctatccgtacccgtaaaggccgctttgaactggcggacgggggcacgttattcctcgatgaaatcggcgaatcgagcgcgtcgtttcaggccaaattgctgcgcattttgcaggaaggtgaaatggaacgggtcggcggcgataccacgctgaaagttgatgtgcgcattattgctgccaccaaccgtaatcttgaagaggaagtgcgtgccgggaattttcgcgaagacctgtattatcgcctgaacgtgatgccggtttcgctgcctgcactgcgtgaaaggctggatgatatcgccgatctggcgccgtttctggtcaaaaagattgcgctgcgtcaggggcgggaactgcgcatcagcgacggtgcggtgcgtctgctgatgacctacagctggccaggcaacgtgcgtgaactggaaaactgtctcgaacgggcgtcggtaatgaccgatgaagggctgatcgaccgcgacgtgatcctgttcaatcaccatgaatccccggcgctgtccgtcaaacccggcctgccgctcgcgacagatgaaagctggctggatcaggaactcgacgaacgccagcgggtgattgccgcactggagaaaaccggctgggtgcaggccaaagcggcccgactgctgggcatgacaccgcgccagattgcctaccgtatccagattatggacatcaacatgcaccgtatctga

SEQ ID NO: 75 - DNA, 1314 bp, Kosakonia sacchari
  misc_feature (1)..(1314): Prm5 with 500bp flanking regions, strain CI006
aaaactaccgccgcaattaatgaacccaacgctactgttgccgggccatgctcttccccggcgcgctgcccggaaaggatatagattgcccagcacgcgccagcaccaagcgcgaacgccgcgccagtgagatcaacatgtgaaacattttcgcccagcggcagcagatacaagaggccaagtaccgccaggatcacccagatgaaatccaccgggcggcgtgaggcaaaaagcgccaccgccagcgggccggtaaattccagcgccaccgcaacgccgagcggtatcgtctggatcgataaatagaacatatagttcatggcgccgagcgacaggccataaaacagcagtggcaggcgttgttcacgggtaaaatgtaaacgccagggcttgaacactacgaccaaaataagggtgccaagtgcgagacgcagcgcggtgacgccgggtgcgccaacaatcggaaacagtgatttcgccagcgacgcgcctccctgaatggacatcatcgcgacaaacaatattaataccggcaaccacaccggcaatttacgagactgcgcaggcatcctttctcccgtcaatttctgtcaaataaagtaaaagaggcagtctacttgaattacccccggctggttgagcgtttgttgaaaaaaagtaactgaaaaatccgtagaatagcgccactctgatggttaattaacctattcaattaagaattatctggatgaatgtgccattaaatgcgcagcataatggtgcgttgtgcgggaaaactgcttttttttgaaagggttggtcagtagcggaaactttctgttacatcaaatggcgctttagaccccaattcccgcaaagagtttcttaactaattttgatatatttaaacgcgtaggacgtaggatttacttgaagcacatttgaggtggattatgaaaaaaattgcatgtctttcagcactggccgcacttctggcggtttctgcaggttccgcagtagcagcaacttcaaccgtaactggcggctacgctcagagcgacgctcagggtattgctaacaaaactaacggtttcaacctgaaatatcgctacgagcaggacaacaacccgctgggtgttatcggttcctttacttacactgaaaaagatcgcaccgaaagcagcgtttataacaaagcgcagtactacggcatcaccgcaggcccggcttaccgcatcaacgactgggcgagcatctacggtgttgtgggtgtaggttacggtaaattccagcagactgtagacaccgctaaagtgtctgacaccagcgactacg

SEQ ID NO: 76 - DNA, 3413 bp, Kosakonia sacchari
  misc_feature (1)..(3413): nifLA operon - upstream intergenic region plus nifL and nifA CDSs, strain CI006
aacacacgctcctgttgaaaaagagatcccgccgggaaatgcggtgaacgtgtctgatattgcgaagagtgtgccagttttggtcgcgggcaaaacctgcaccagtttggttattaatgcaccagtctggcgctttttttcgccgagtttctcctcgctaatgcccgccaggcgcggctttggcgctgatagcgcgctgaataccgatctggatcaaggttttgtcgggttatcagccaaaaggtgcactctttgcatggttatacgtgcctgacatgttgtccgggcgacaaacggcctggtggcacaaattgtcagaactacgacacgactaactgaccgcaggagtgtgcgatgaccctgaatatgatgatggatgccggcgcgcccgaggcaatcgccggtgcgctttcgcgacaccatcctgggctgttttttaccatcgttgaagaagcgcccgtcgccatttcgctgactgatgccgacgcacgcattgtctatgccaacccggctttctgccgccagaccggctatgaactagaagcgttgttgcagcaaaatccccgcctgcttgcaagtcgccaaaccccacgggaaatctatcaggatatgtggcacaccttgttacaacgccgaccgtggcgcgggcaattgattaaccgccaccgcgacggcagcctgtatctggtcgagatcgatatcaccccggtgattaacccgtttggcgaactggaacactacctggcaatgcagcgcgatatcagcgccagttatgcgctggagcagcggttgcgcaatcacatgacgctgaccgaagcggtgctgaataacattccggcggcggtggttgtagtggatgaacgcgatcatgtggttatggataaccttgcctacaaaacgttctgtgccgactgcggcggaaaagagctcctgagcgaactcaatttttcagcccgaaaagcggagctggcaaacggccaggtcttaccggtggtgctgcgcggtgaggtgcgctggttgtcggtgacctgctgggcgctgccgggcgtcagcgaagaagccagtcgctactttattgataacaggctgacgcgcacgctggtggtgatcaccgacgacacccaacaacgccagcagcaggaacagggccgacttgaccgccttaaacagcagatgaccaacggcaaactactggcagcgatccgcgaagcgcttgacgccgcgctgatccagcttaactgccccatcaatatgctggcggcggcgcgacgtttaaacggcagtgataacaacaatgtggcgctcgacgccgcgtggcgcgaaggtgaagaggcgatggcgcggctgaaacgttgccgcccgtcgctggaactggaaagtgcggccgtctggccgctgcaacccttttttgacgatctgcgcgcgctttatcacacccgctacgagcaggggaaaaatttgcaggtcacgctggattcccatcatctggtgggatttggtcagcgtacgcaactgttagcctgcctgagtctgtggctcgatcgcacgctggatattgccgccgggctgggtgatttcaccgcgcaaacgcagatttacgcccgcgaagaagagggctggctctctttgtatatcactgacaatgtgccgctgatcccgctgcgccacacccactcgccggatgcgcttaacgctccgggaaaaggcatggagctgcgcctgatccagacgctggtggcacaccaccacggcgcaatagaactcacttcacaccccgaagggggaagttgcctgaccctacgattcccgctatttcattcactgaccggaggttcaaaatgacccagcgaaccgagtcgggtaataccgtctggcgcttcgatttgtcccagcagttcactgcgatgcagcgcataagcgtggtactcagccgggcgaccgaggtcgatcagacgctccagcaagtgctgtgcgtattgcacaatgacgcctttttgcagcacggcatgatctgtctgtacgacagccagcaggcgattttgaatattgaagcgttgcaggaagccgatcagcagttaatccccggcagctcgcaaatccgctatcgtccgggcgaagggctggtcgggacggtgctttcgcagggccaatcattagtgctggcgcgcgttgctgacgatcagcgctttcttgaccggctcgggttgtatgattacaacctgccgtttatcgccgtgccgctgatagggccagatgcgcagactttcggtgtgctgacggcacaacccatggcgcgttacgaagagcgattacccgcctgcacccgctttctggaaacggtcgctaacctggtcgcgcaaaccgtgcgtttgatggcaccaccggcagtgcgcccttccccgcgcgccgccataacacaggccgccagcccgaaatcctgcacggcctcacgcgcatttggttttgaaaatatggtcggtaacagtccggcgatgcgccagaccatggagattatccgtcaggtttcgcgctgggacaccaccgttctggtacgcggcgagagtggcaccggcaaggagctgattgccaacgccatccaccaccattcgccgcgtgccggtgcgccatttgtgaaattcaactgtgcggcgctgccggacacactgctggaaagcgaattgttcggtcacgagaaaggggcatttaccggcgcggtacgccagcgtaaaggccgttttgagctggccgatggcggcacgctgtttcttgacgagatcggcgagagtagcgcctcgtttcaggctaagctgctgcgcattttgcaggaaggcgaaatggaacgcgtcggcggcgacgagacattgcaagtgaatgtgcgcattattgccgcgacgaaccgcaatcttgaagatgaagtccggctggggcactttcgcgaagatctctattatcgcctgaatgtgatgcccatcgccctgccgccactacgcgaacgccaggaggacattgccgagctggcgcactttctggtgcgtaaaatcgcccataaccagagccgtacgctgcgcattagcgagggcgctatccgcctgctgatgagctacaactggcccggtaatgtgcgcgaactggaaaactgccttgagcgctcagcggtgatgtcggagaacggtctgatcgatcgggatgtgattttgtttaatcatcgcgaccagccagccaaaccgccagttatcagcgtctcgcatgatgataactggctcgataacaaccttgacgagcgccagcggctgattgcggcgctggaaaaagcgggatgggtacaagccaaagccgcgcgcttgctggggatgacgccgcgccaggtcgcctatcgtattcagacgatggatataaccctgccaaggctataa

SEQ ID NO: 77 - protein, 495 aa, Kosakonia sacchari
  MISC_FEATURE (1)..(495): NifL, strain CI006
MTLNMMMDAGAPEAIAGALSRHHPGLFFTIVEEAPVAISLTDADARIVYANPAFCRQTGYELEALLQQNPRLLASRQTPREIYQDMWHTLLQRRPWRGQLINRHRDGSLYLVEIDITPVINPFGELEHYLAMQRDISASYALEQRLRNHMTLTEAVLNNIPAAVVVVDERDHVVMDNLAYKTFCADCGGKELLSELNFSARKAELANGQVLPVVLRGEVRWLSVTCWALPGVSEEASRYFIDNRLTRTLVVITDDTQQRQQQEQGRLDRLKQQMTNGKLLAAIREALDAALIQLNCPINMLAAARRLNGSDNNNVALDAAWREGEEAMARLKRCRPSLELESAAVWPLQPFFDDLRALYHTRYEQGKNLQVTLDSHHLVGFGQRTQLLACLSLWLDRTLDIAAGLGDFTAQTQIYAREEEGWLSLYITDNVPLIPLRHTHSPDALNAPGKGMELRLIQTLVAHHHGAIELTSHPEGGSCLTLRFPLFHSLTGGSK

SEQ ID NO: 78 - protein, 524 aa, Kosakonia sacchari
  MISC_FEATURE (1)..(524): NifA, strain CI006
MTQRTESGNTVWRFDLSQQFTAMQRISVVLSRATEVDQTLQQVLCVLHNDAFLQHGMICLYDSQQAILNIEALQEADQQLIPGSSQIRYRPGEGLVGTVLSQGQSLVLARVADDQRFLDRLGLYDYNLPFIAVPLIGPDAQTFGVLTAQPMARYEERLPACTRFLETVANLVAQTVRLMAPPAVRPSPRAAITQAASPKSCTASRAFGFENMVGNSPAMRQTMEIIRQVSRWDTTVLVRGESGTGKELIANAIHHHSPRAGAPFVKFNCAALPDTLLESELFGHEKGAFTGAVRQRKGRFELADGGTLFLDEIGESSASFQAKLLRILQEGEMERVGGDETLQVNVRIIAATNRNLEDEVRLGHFREDLYYRLNVMPIALPPLRERQEDIAELAHFLVRKIAHNQSRTLRISEGAIRLLMSYNWPGNVRELENCLERSAVMSENGLIDRDVILFNHRDQPAKPPVISVSHDDNWLDNNLDERQRLIAALEKAGWVQAKAARLLGMTPRQVAYRIQTMDITLPRL

SEQ ID NO: 79 - DNA, 2850 bp, Kosakonia sacchari
  gene (1)..(2850): glnE, strain CI006
atgccgcaccacgcaggattgtcgcagcactggcaaacggtattttctcgtctgccggaatcgctcaccgcgcagccattgagcgcgcaggcgcagtcagtgctcacttttagtgattttgttcaggacagcatcatcgcgcatcctgagtggctggcagagcttgaaagcgcgccgccgcctgcgaacgaatggcaacactatgcgcaatggctgcaagcggcgctggatggcgtcaccgatgaagcctcgctgatgcgcgcgctgcggctgtttcgccgtcgcatcatggtgcgcatcgcctggagccaggcgttacagttggtggcggaagaagatatcctgcaacagcttagcgtgctggcggaaaccctgatcgtcgccgcgcgcgactggctttatgaggcctgctgccgtgagtggggaacgccgagcaatccacaaggcgtggcgcagccgatgctggtactcggcatgggcaaactgggtggcggcgaactcaatttctcatccgatatcgatttgattttcgcctggccggaaaatggcgcaacgcgcggtggacgccgtgagctggataacgcgcaatttttcactcgccttggtcaacggctgattaaagtcctcgaccagccaacgcaggatggctttgtctaccgcgtcgatatgcgcttgcgcccgtttggcgacagcggcccgctggtgctgagctttgccgcgctggaagattactaccaggagcaggggcgcgattgggaacgctacgcgatggtgaaagcgcgcattatgggcgataacgacggcgaccatgcgcgggagttgcgcgcaatgctgcgcccgtttgttttccgccgttatatcgacttcagcgtgattcagtccctgcgtaacatgaaaggcatgattgcccgcgaagtgcgtcgccgtggcctgaaggacaacattaagctcggcgcgggcgggatccgcgaaatagaatttatcgtccaggttttccagctgattcgcggcggtcgcgagcctgcactgcaatcgcgttcactgttgccgacgcttgctgccatagatcaactgcatctgctgccggatggcgacgcaacccggctgcgcgaggcgtatttgtggctgcgacggctggagaacctgctgcaaagcatcaatgacgaacagacacagacgctgccgggcgatgaactgaatcgcgcgcgcctcgcctggggaatgggcaaagatagctgggaagcgctctgcgaaacgctggaagcgcatatgtcggcggtgcgtcagatatttaacgatctgattggcgatgatgaaacggattcgccggaagatgcgctttctgagagctggcgcgaattgtggcaggatgcgttgcaggaggaggattccacgcccgtgctggcgcatctctcagaggacgatcgccgccgcgtggtggcgctgattgccgattttcgcaaagagttggataaacgcaccattggcccgcgagggcggcaggtactcgatcacttaatgccgcatctgctcagcgatgtatgctcgcgcgacgatgcgccagtaccgctgtcacgcctgacgccgctgctcaccggaattattacccgcaccacttaccttgagctgctaagtgaatttcccggcgcactgaaacacctcatttccctgtgtgccgcgtcgccgatggttgccagtcagctggcgcgctacccgatcctgcttgatgaattgctcgacccgaatacgctctatcaaccgacggcgatgaatgcctatcgcgatgagctgcgccaatacctgctgcgcgtgccggaagatgatgaagagcaacagcttgaggcgctgcggcagtttaagcaggcgcagttgctgcgcgtggcggcggcggatattgccggtacgttgccagtaatgaaagtgagcgatcacttaacctggctggcggaagcgattattgatgcggtggtgcagcaagcctgggggcagatggtggcgcgttatggccagccaacgcatctgcacgatcgcgaagggcgcggttttgcggtggtcggttatggcaagctgggcggctgggagctgggttacagctccgatctggatctggtattcctgcacgactgcccgatggatgtgatgaccgatggcgagcgtgaaatcgatggtcgccagttctatttgcgtctcgcgcagcgcgtgatgcacctgtttagcacgcgcacgtcgtccggcatcctttatgaagttgatgcgcgtctgcgtccatctggcgctgcggggatgctggtcactactacggaatcgttcgccgattaccagcaaaacgaagcctggacgtgggaacatcaggcgctggcccgtgcgcgcgtggtgtacggcgatccgcaactgaccgccgaatttgacgccattcgccgcgatattctgatgacgcctcgcgacggcgcaacgctgcaaaccgacgtgcgagaaatgcgcgagaaaatgcgtgcccatcttggcaacaagcataaagaccgcttcgatctgaaagccgatgaaggcggtatcaccgacatcgagtttatcgcccaatatctggtgctgcgctttgcccatgacaagccgaaactgacgcgctggtcggataatgtgcgcattctcgaagggctggcgcaaaacggcatcatggaggagcaggaagcgcaggcattgacgctggcgtacaccacattgcgtgatgagctgcaccacctggcgctgcaagagttgccgggacatgtggcgctctcctgttttgtcgccgagcgtgcgcttattaaaaccagctgggacaagtggctggtggaaccgtgcgccccggcgtaa

SEQ ID NO: 80 - DNA, 1563 bp, Kosakonia sacchari; identical to SEQ ID NO: 61
  gene (1)..(1563): glnE_KO1, strain CI006

SEQ ID NO: 81 - protein, 949 aa, Kosakonia sacchari
  MISC_FEATURE (1)..(949): glnE, strain CI006
MPHHAGLSQHWQTVFSRLPESLTAQPLSAQAQSVLTFSDFVQDSIIAHPEWLAELESAPPPANEWQHYAQWLQAALDGVTDEASLMRALRLFRRRIMVRIAWSQALQLVAEEDILQQLSVLAETLIVAARDWLYEACCREWGTPSNPQGVAQPMLVLGMGKLGGGELNFSSDIDLIFAWPENGATRGGRRELDNAQFFTRLGQRLIKVLDQPTQDGFVYRVDMRLRPFGDSGPLVLSFAALEDYYQEQGRDWERYAMVKARIMGDNDGDHARELRAMLRPFVFRRYIDFSVIQSLRNMKGMIAREVRRRGLKDNIKLGAGGIREIEFIVQVFQLIRGGREPALQSRSLLPTLAAIDQLHLLPDGDATRLREAYLWLRRLENLLQSINDEQTQTLPGDELNRARLAWGMGKDSWEALCETLEAHMSAVRQIFNDLIGDDETDSPEDALSESWRELWQDALQEEDSTPVLAHLSEDDRRRVVALIADFRKELDKRTIGPRGRQVLDHLMPHLLSDVCSRDDAPVPLSRLTPLLTGIITRTTYLELLSEFPGALKHLISLCAASPMVASQLARYPILLDELLDPNTLYQPTAMNAYRDELRQYLLRVPEDDEEQQLEALRQFKQAQLLRVAAADIAGTLPVMKVSDHLTWLAEAIIDAVVQQAWGQMVARYGQPTHLHDREGRGFAVVGYGKLGGWELGYSSDLDLVFLHDCPMDVMTDGEREIDGRQFYLRLAQRVMHLFSTRTSSGILYEVDARLRPSGAAGMLVTTTESFADYQQNEAWTWEHQALARARVVYGDPQLTAEFDAIRRDILMTPRDGATLQTDVREMREKMRAHLGNKHKDRFDLKADEGGITDIEFIAQYLVLRFAHDKPKLTRWSDNVRILEGLAQNGIMEEQEAQALTLAYTTLRDELHHLALQELPGHVALSCFVAERALIKTSWDKWLVEPCAPA

SEQ ID NO: 82 - protein, 520 aa, Kosakonia sacchari
  MISC_FEATURE (1)..(520): GlnE_KO1, strain CI006
MFNDLIGDDETDSPEDALSESWRELWQDALQEEDSTPVLAHLSEDDRRRVVALIADFRKELDKRTIGPRGRQVLDHLMPHLLSDVCSRDDAPVPLSRLTPLLTGIITRTTYLELLSEFPGALKHLISLCAASPMVASQLARYPILLDELLDPNTLYQPTAMNAYRDELRQYLLRVPEDDEEQQLEALRQFKQAQLLRVAAADIAGTLPVMKVSDHLTWLAEAIIDAVVQQAWGQMVARYGQPTHLHDREGRGFAVVGYGKLGGWELGYSSDLDLVFLHDCPMDVMTDGEREIDGRQFYLRLAQRVMHLFSTRTSSGILYEVDARLRPSGAAGMLVTTTESFADYQQNEAWTWEHQALARARVVYGDPQLTAEFDAIRRDILMTPRDGATLQTDVREMREKMRAHLGNKHKDRFDLKADEGGITDIEFIAQYLVLRFAHDKPKLTRWSDNVRILEGLAQNGIMEEQEAQALTLAYTTLRDELHHLALQELPGHVALSCFVAERALIKTSWDKWLVEPCAPA

SEQ ID NO: 83 - protein, 341 aa, Kosakonia sacchari
  MISC_FEATURE (1)..(341): GlnE ATase domain, strain CI006
EEQQLEALRQFKQAQLLRVAAADIAGTLPVMKVSDHLTWLAEAIIDAVVQQAWGQMVARYGQPTHLHDREGRGFAVVGYGKLGGWELGYSSDLDLVFLHDCPMDVMTDGEREIDGRQFYLRLAQRVMHLFSTRTSSGILYEVDARLRPSGAAGMLVTTTESFADYQQNEAWTWEHQALARARVVYGDPQLTAEFDAIRRDILMTPRDGATLQTDVREMREKMRAHLGNKHKDRFDLKADEGGITDIEFIAQYLVLRFAHDKPKLTRWSDNVRILEGLAQNGIMEEQEAQALTLAYTTLRDELHHLALQELPGHVALSCFVAERALIKTSWDKWLVEPCAPA

SEQ ID NO: 84 - DNA, 1342 bp, Kosakonia sacchari
  misc_feature (1)..(1342): Prm5 inserted into nifL region, strain CI006, now strain CM029
ccgagcgtcggggtgcctaatatcagcaccggatacgagagaaaagtgtctacatcggttcggttgatattgaccggcgcatccgccagcccgcccagtttctggtggatctgtttggcgattttgcgggtcttgccggtgtcggtgccgaaaaaaataccaatatttgccataacacacgctcctgttgaaaaagagatcccgccgggaaatgcggtgaacgtgtctgatattgcgaagagtgtgccagttttggtcgcgggcaaaacctgcaccagtttggttattaatgcaccagtctggcgctttttttcgccgagtttctcctcgctaatgcccgccaggcgcggctttggcgctgatagcgcgctgaataccgatctggatcaaggttttgtcgggttatcagccaaaaggtgcactctttgcatggttatacgtgcctgacatgttgtccgggcgacaaacggcctggtggcacaaattgtcagaactacgacacgactaactgaccgcaggagtgtgcgatgaccctgaatatgatgatggatgccggcggacatcatcgcgacaaacaatattaataccggcaaccacaccggcaatttacgagactgcgcaggcatcctttctcccgtcaatttctgtcaaataaagtaaaagaggcagtctacttgaattacccccggctggttgagcgtttgttgaaaaaaagtaactgaaaaatccgtagaatagcgccactctgatggttaattaacctattcaattaagaattatctggatgaatgtgccattaaatgcgcagcataatggtgcgttgtgcgggaaaactgcttttttttgaaagggttggtcagtagcggaaacaactcacttcacaccccgaagggggaagttgcctgaccctacgattcccgctatttcattcactgaccggaggttcaaaatgacccagcgaaccgagtcgggtaataccgtctggcgcttcgatttgtcccagcagttcactgcgatgcagcgcataagcgtggtactcagccgggcgaccgaggtcgatcagacgctccagcaagtgctgtgcgtattgcacaatgacgcctttttgcagcacggcatgatctgtctgtacgacagccagcaggcgattttgaatattgaagcgttgcaggaagccgatcagcagttaatccccggcagctcgcaaatccgctatcgtccgggcgaagggctggtcgggacggtgctttcgcagggccaatcattagtgctggcgcgcgttgctgacgatcagcgctttcttgaccggctcgggttgtatgattacaacctgccgtttatc

SEQ ID NO: 85 - DNA, 1270 bp, Rahnella aquatilis
  gene (1)..(1270): 16S
  misc_feature (186)..(186): n is a, c, t, g, unknown or other
  misc_feature (458)..(458): n is a, c, t, g, unknown or other
  misc_feature (1041)..(1041): n is a, c, t, g, unknown or other
  misc_feature (1131)..(1132): n is a, c, t, g, unknown or other
  misc_feature (1135)..(1135): n is a, c, t, g, unknown or other
  misc_feature (1139)..(1140): n is a, c, t, g, unknown or other
attgaagagtttgatcatggctcagattgaacgctggcggcaggcctaacacatgcaagtcgagcggcagcgggaagtagcttgctactttgccggcgagcggcggacgggtgagtaatgtctgggaaactgcctgatggagggggataactactggaaacggtagctaataccgcatgacctcgnaagagcaaagtgggggatcttcggacctcacgccatcggatgtgcccagatgggattagctagtaggtgaggtaatggctcacctaggcgacgatccctagctggtctgagaggatgaccagccacactggaactgagacacggtccagactcctacgggaggcagcagtggggaatattgcacaatgggcgcaagcctgatgcagccatgccgcgtgtgtgaagaaggccttagggttgtaaagcactttcagcgaggaggaaggcatcanacttaatacgtgtggtgattgacgttactcgcagaagaagcaccggctaactccgtgccagcagccgcggtaatacggagggtgcaagcgttaatcggaattactgggcgtaaagcgcacgcaggcggtttgttaagtcagatgtgaaatccccgcgcttaacgtgggaactgcatttgaaactggcaagctagagtcttgtagaggggggtagaattccaggtgtagcggtgaaatgcgtagagatctggaggaataccggtggcgaaggcggccccctggacaaagactgacgctcaggtgcgaaagcgtggggagcaaacaggattagataccctggtagtccacgctgtaaacgatgtcgacttggaggttgtgcccttgaggcgtggcttccggagctaacgcgttaagtcgaccgcctggggagtacggccgcaaggttaaaactcaaatgaattgacgggggcccgcacaagcggtggagcatgtggtttaattcgatgcaacgcgaagaaccttacctactcttgacatccacggaattcgccagagatggcttagtgccttcgggaaccgtganacaggtgctgcatggctgtcgtcagctcgtgttgtgaaatgttgggttaagtcccgcaacgagcgcaacccttatcctttgttgccagcnngtnatgnngggaactcaaaggagactgccggtgataaaccggaggaaggtggggatgacgtcaagtcatcatggcccttacgagtagggctacacacgtgctacaatggcatatacaaagagaagcgaactcgcgagg

SEQ ID NO: 86 - DNA, 876 bp, Rahnella aquatilis
  gene (1)..(876): nifH
atggcaatgcgtcaatgcgcaatctacgggaaagggggtattgggaaatccaccactacccaaaaccttgtagcggctctggccgaaatgaataagaaggtcatgatcgtcggctgtgaccctaaggctgattcaacccgcctcattctgcatgcgaaagcacagaacaccatcatggaaatggccgctgaagtgggctccgtggaagatctggagctggaagatgtgatgcaaatcggctatggcggcgtgcgctgtgcggaatcaggcggccctgagcctggtgtgggttgtgccggacgcggggtgatcaccgccatcaacttcctcgaagaagaaggcgcgtatgtgccggatctggattttgtgttttacgacgtattgggcgatgtggtctgtggcggtttcgcgatgccaattcgcgaaaacaaagcgcaggaaatctacatcgtgtgctccggtgaaatgatggcgatgtatgccgccaacaacatttccaaaggcatcgtgaaatacgcgaaatcgggcaaagttcgcctggccgggctgatctgtaactcccgccagacggatcgcgaagatgaactgatcatcgcgctggctgaaaaacttggcacgcaaatgatccacttcgtgccgcgtgacaacattgtgcaacgcgctgaaatccgccgcatgacggtcatcgaatacgacccgacttgtgcgcaggcagatcagtatcgtgcactggcgaacaaaatcgtcaacaacaccaaaatggtggtgccgacaccggtcaccatggatgagctggaagccctgttaatggaatttggcattatggaagaagaagacctggccatcgtcggtcgtaccgccgccgaagaggcgtga

SEQ ID NO: 87 - DNA, 1374 bp, Rahnella aquatilis
  gene (1)..(1374): nifD1
atgaaggcaaaagagattctggcgctgattgatgagccagcctgtgagcataaccacaagcagaagtcgggttgcagcctgccgaaaccgggcgcgacggcaggcggttgtgcgtttgatggcgcgcagattgcgctgctgccggtcgcggacgtcgcgcatctggtgcacggcccgattggctgtaccggcagttcatgggacaaccgtggcagccgcagttccgggccttccatcaaccgcatgggcttcaccaccgacatgagcgagcaggatgtgattatggggcgcggcgagcgacgcttatttcacgccgtgcagcacatcgtcagccattaccatccggtggcggtctttatttacaacacctgcgtacccgcgatggaaggggatgacgttgaagccgtgtgtcgcgccgcatcggccgctgccggtgtgccggttatttcagtcgatgccgccggtttctacggcagcaaaaatctcggtaaccgcattgccggggacgtgatggtcaaaaaggtgatcggccagcgcgaacccgcgccgtggccggaaaactcaccgatccccgccggacaccgccacagcatcagcctgattggcgaattcaatattgccggcgagttctggcacgttctgccgctgctcgatgagctcgggatccgcgtgctgtgcagcctttccggggattcccgttttgctgaaatccagactatgcaccgtggcgaagccaacatgctggtgtgctcgcgggcgctgatcaacgtcgcccgaaaaatggaagagcgttaccagatcccatggtttgaaggcagtttttatggcctgcgttccatggctgattccctgcgcacgatcgccgtgctgctcaaagacccggatttacaggcgcgcacagaacgtctgattgagcgcgaggaggcggcgacacatcttgcgcttgcgccttaccgtgcgcggctcagcgggcgcaaggcgctgctgtataccggtggcgtgaaatcctggtcggtggtctcggcgttacaggatttaggcatcacggtggtggcgaccggcacccgaaaatcaaccgaagaagacaagcagcgtattcgcgaactgatgggtgaagacgtgctgatgctcgacgaaggcaatgccagaaccttgctcgacaccctctatcgtttcggcggcgacatcatgatcgccgggggccgcaacatgtataccgcgtacaaagcccgcctgccgttcctggatatcaatcaggagcgcgagcatgcgtttgccggatatcacgggctggtaaatctggccgaacagttgtgtatcaccctggaaagcccggtctgggcgcaggtcaaccgtctggcgccgtggcgctaa

SEQ ID NO: 88 - DNA, 1449 bp, Rahnella aquatilis
  gene (1)..(1449): nifD2
atgaccagtgaaacacgcgaacgtaacgaggcattgatccaggaagtgctggagatcttccccgagaaggcgcttaaagatcgtaagaaacacatgatgaccaccgacccggcgatggaatctgtcggcaagtgtattgtctcaaaccgcaaatcacagccgggcgtgatgaccgtgcgaggctgcgcttacgccggttccaaaggcgtggtctttggcccgatcaaagacatggcgcatatctcccacggcccggttggttgcggccagtattcccgtgccggacgccgtaactattacaccggctggagcggcgtgaacagctttggcaccctcaacttcaccagtgattttcaggaacgggacatcgtatttggcggcgataaaaagctcgacaaattgatcgatgaactggagatgttgttcccgctgagcaaaggcatttcggtgcagtcggaatgtccggtcggtctgatcggcgatgacatttctgccgtcgccaaagccagcagcgccaaaatcggtaagccggtcgtgccggtacgctgcgaggggttccgcggtgtgtcgcaatcgctcggccatcacattgctaacgatgtcatccgcgactgggtgctggataaccgcgaaggcaatgaatttgaaaccacgccttacgacgtggcgattatcggcgactacaacatcggcggtgacgcctgggcctcacgtattctgctcgaagaaatggggctgcgcgtggtggcgcagtggtccggcgacggcacgctggtggagatggaaaacaccccgaaagtcgcgctcaatctggtgcactgctaccgctcgatgaactacatctcccgtcatatggaagaaaaacacggcattccgtggatggaatacaacttctttggcccgaccaaaattgcggaatctctgcgcgaaatcgcggcgcgttttgacgataccatccggaaaaacgccgaagcggtgattgaaaaatatcaggcgcaaacgcaggcggtgatcgacaaataccgtccgcgtctggaaggcaaaaaggtgctgttgtatctcggcggtttacgtccgcgccacatcatcggggcgtatgaagatctgggaatggaaatcatcggtaccggctatgaattcggtcataacgatgattacgaccgcaccttaccgatgctcaaagaaggcacgttgctgttcgatgacctgagcagttatgagctggaagcgttcgttaaagcgctgaaaccggatcttgtcgggtcaggtatcaaagaaaaatacattttccagaaaatgggcgtgccgttccgccagatgcactcctgggattattccggcccttatcacggctacgacggtttcggcatttttgcccgtgacatggacatgacgctgaacaatccgggctggagtcagctgaccgccccctggttgaaaacggcctga

SEQ ID NO: 89 - DNA, 1386 bp, Rahnella aquatilis
  gene (1)..(1386): nifK1
atggctcaaattctgcgtaatgccaagccgcttgccaccacgcctgtcaaaagcgggcaaccgctcggggcgatcctggccagtcaggggctggaaaattgcatcccgctggttcacggcgcgcaaggttgtagcgcgttcgccaaagttttcttcatccagcattttcacgatccgatcccgttgcagtccacggcgatggaatcgaccacgactatcatgggctcggatggcaacgtcagtactgcgttgaccacgttgtgtcagcgcagtaatccaaaagccattgtgattttgagcaccggactgtcagaagcgcagggcagtgatttgtcgatggcgctgcgtgagtttcgcgacaaagaaccgcgctttaatgccatcgctattctgaccgttaacacgccggatttttacggctcgctggaaaacggctacagcgcgctgatggaaagcgtgatcactcagtgggtgccggaaaagccgccgaccggcatgcgtaacaagcgcgtgaacctgctggtgagccatctgctgacgccgggggatctggaattactgcgcagctatgtcgaagcctttggcctgcaaccggtgatcctgccggatttatcacagtcgctggacggacatctggcgaatggcgatttcaatccggtcacgcagggcggcacgtcgcaacgccagattgaacaaatggggcagagcctgaccaccattaccattggcagttcgctcaactgcgccgccagtctgatggcgatgcgcagccgtggcatggcgctgaacctgccgcacctgatgacgctggaaaacatggacagtctgatccgccatctgcatcaggtgtcaggccgcgaggtaccggcatggattgagcgccagcgcgggcaactgctggacgccatgatcgactgccatacctggctgcagtcacagcgtattgcgctggcggcagaagcggatttgctggtggcgtggtgcgatttcgctcagagccagggaatgcgcgtcgggccggtgattgcgccggttaatcagcagtcactggccgggctgccggtcgaacaggtggtgatcggcgatctggaagatttacaaacccggctcgacagctacccggtttcactgctggtggcgaactcccacgctgcaccactggcggaaaaaaacggtatcgcgctggtacgtgccggtttcccgctttacgaccgtctcggggaatttcgccgcgtgcggcagggctatgcgggtattcgcgacaccttgttcgaactcgcgaacctgatgcaggcgcgccatcacatgctgacggcgtatcactcaccgcttaggcaggtgttcggcctgagcccggtaccggaggccagtcatgaggcgcgctaa

SEQ ID NO: 90 - DNA, 1569 bp, Rahnella aquatilis
  gene (1)..(1569): nifK2
atgagtcaagatcttggcaccccaaaatcctgtttcccgctgttcgagcaggatgaataccagaatatgtttacccacaaacgcgcgctggaagaagcacacggcgaggcgaaagtgcgggaagtgtttgaatggaccaccacgcaggaatatcaggatctgaacttctcgcgtgaagcgctgaccgtcgacccggcgaaagcctgccagccgttaggcgcggtactttgcgcgctgggttttaccaacacgttgccgtatgtccatggttcacaaggctgtgtggcgtatttccgtacctattttaatcgtcatttcaaagagccggtggcctgtgtttccgactcaatgaccgaagatgccgccgtttttggcggaaataacaacatgaatgtcggtctggaaaacgccagcgcgctgtacaagccggaaattattgcggtctccaccacctgtatggcggaagtgatcggtgatgacctgcaggcttttatcgccaacgccaaaaaagacggatttgtggatgccggtatgccaatcccgtatgcccatacaccgagttttctgggcagtcatgtcaccggctgggacaacatgtttgaaggcttcgcccgtacctttaccaccgacgccacgcgggaatatcagccgggcaaacttgccaaactgaacgtggtgaccggttttgaaacttatctcggcaactaccgggttattcaccgcatgatgagccagatgggggtcgaatgcagcgtcttgtccgatccgtctgaagtgctcgacaccccggctgacggccaataccgcatgtatgccggcggcaccacgcaaaccgaaatgcgtgatgcaccggatgccatcgacaccttgctgctgcaaccgtggcaattacagaaaaccaaaaaggtggtgcagggcgactggaatcagccgggcaccgaagtcagtgtaccgattggcctggcggcgaccgatgccttgctgatgacggtaagcgaactgaccggcaaaccgatagctgacgcgctggcgactgaacgtggccgtctggtggacatgatgctcgattctcacacctggctgcacggcaagcgtttcggtctctacggtgacccggattttgtgatgggcatgaccgcattcctgctggaactgggctgtgaaccgaccaccattctcagccataacggcaacaaacgctggcagaaagccatgaagaaaatgctggctgattcgccttacggacaggacagcgaagtgtatgtgaactgcgatctgtggcatttccgctcgctgatgtttacccgtaaaccggactttatgatcggcaactcttacggaaaattcattcagcgtgacacgctggccaaaggcgaacagttcgaagtgccgctgatccgtatcggattcccgatttttgaccggcaccatttgcaccgtcagaccacctggggatacgagggcgcgatgagcatcctgacgcaactggtgaatgcggtgctcgaacagctggatcgcgaaaccatgaagctcggcaaaaccgactacaacttcgatctgatccgctaa

SEQ ID NO: 91 - DNA, 1488 bp, Rahnella aquatilis
  gene (1)..(1488): nifL
atgagcatcacggcgttatcagcatcatttcctgaggggaatatcgccagccgcttgtcgctgcaacatccttcactgttttataccgtggttgaacaatcatcggtggcgatttcgctgaccgatccgcaggcgcgcatttgttatgccaatccggcattctgccgccagacgggttttgcacttgagacacttttgggcgagaaccaccgtctgctggccagccagcagacgccgaaacatatctatgacgaaatgtggcgcactttgttgcagggcaaatcctggaacggccaactgatcaaccggcgtaataaccgttcgctttatctggcggatgtcactatcacgcctgttttaggcgcggacgggcaggtggagcattacctcggcatgcacaaagatatcagcgagaaatacgcgctggagcagcggttgcgcaaccacatcaccttgttcacggaggtgctgaacaatattcccgccgccgtggtggtggtggatgagcaggacaatgtggtgatggacaatctggcctacaaaaccctgtgcgctgactgcggcggaaaagagctgttggccgaaatgggctatccgcaactcaaagagatgctcaacagtggcgaaccggtgccggtttccatgcgcggcaacgtacgctggttttctttcggtcagtggtcattgcagggcgttaatgaagaggccagccgcttttttaccggcattaccgcgccgggaaaactgattgttctcaccgactgcaccgatcagcatcaccggcagcagcagggttatcttgaccggctcaagcaaaaacttaccaacggcaaattgctggcagccatccgcgagtcgcttgatgccgcgctgattcagctcaacgggccaattaatatgctggcggctgcgcgtcgtcttaacggcgaagaaggcaacaacatggcgctggaattcgcctggcgcgaaggcgagcaggcggtgagtcgcttacaggcctgccgtccgtcgctggattttgagccgcaggcagaatggccggtcagtgaattcttcgacgatctgagcgcgctgtacgacagccattttctcagtgacggtgaattgcgttacgtggtcatgccatctgatctgcacgctgtcgggcaacgaacgcaaatccttaccgcgctgagcttatggattgatcacacgctgtcacaggcgcaggccatgccgtctctgaagctctcggtgaacattgttgcgaagcaggatgcgagctggttgtgttttgacattaccgataatgtgccgcgtgaacgggtgcgttatgcccgcccggaagcggcgttttcccgtccggggaatggcatggagctgcgccttatccagacgctgatcgcccatcatcgcggttctttagatctctcggtccgccctgatggcggcaccttgctgacgttacgcctgccggtacagcaggttatcaccggaggcttaaaatga

SEQ ID NO: 92 - DNA, 1557 bp, Rahnella aquatilis
  gene (1)..(1557): nifA
atgacccagttacctaccgcgggcccggttatccggcgctttgatatgtctgcccagtttacggcgctttatcgcatcagcgtggcgctgagtcaggaaagcaataccgcgcgcgcactggcggcgatcctcgaagtgcttcacgatcatgcatttatgcaatacggcatggtgtgtctgttcgataaagaacgcaatgcactgtttgtggaatccctgcatggcatcgacggcgaaaggaaaaaagagacccgccatgtccgttaccgcatgggggaaggcgtgatcggcgcggtgatgagccagcgtcaggcgctggtgttaccgcgcatttcagacgatcagcgttttctcgaccgcctgaatatttacgattacagcctgccgctgattggtgtgccgatccccggtgcggataatcagcctgcgggtgtgctggtggcacagccgatggcgttgcacgaagaccggctggctgccagtacgcggtttttagaaatggtcgccaatctcatcagccagccactgcgttctgccacgcccccggaatcattgcctgctcaaacgccggtccggtgcagtgttccgcgccagtttggttttgagcagatggtcgggaaaagtcaggcgatgcgccagacgatggacattttacggcaggtttccaaatgggataccacggttctggtgcgtggtgaaagcggcaccggcaaggaacttatcgccaatgccattcattacaactcaccccgtgcggccgcgccatttgtgaaattcaactgcgccgcgctgccggataacctgctggaaagcgaactgttcggtcatgaaaaaggggccttcaccggcgctatacgcacccgaaaaggccgctttgaactggcggacgggggcacgttattcctcgatgaaatcggcgaatcgagcgcgtcgtttcaggccaaattgctgcgcattttgcaggaaggtgaaatggaacgggtcggcggcgataccacgctgaaagttgatgtgcgcattattgctgccaccaaccgtaatcttgaggaggaagtgcgtgccgggaattttcgcgaagacctgtattatcgcctgaacgtgatgccggtttcgctgcctgcactgcgtgaaaggctggatgatatcgccgatctggcgccgtttctggtcaaaaagattgcgctgcgtcaggggcgggaactgcgcatcagtgatggtgcggtgcgtctgctgatgacctacagctggccaggcaacgtgcgtgaactggaaaactgcctcgaacgggcgtcggtaatgaccgatgaagggctgatcgaccgcgacgtgatcctgttcaatcaccatgagtccccggcgctgtccgtcaaacccggtctgccgctggcgacagatgaaagctggctggatcaggaactcgacgaacgccagcgggtgattgctgcactggagaaaaccggctgggtgcaggccaaagcggcccgactgctgggcatgacaccgcgccagattgcctaccgtatccagattatggacatcaacatgcaccgtatctga

SEQ ID NO: 93 - DNA, 2838 bp, Rahnella aquatilis
  gene (1)..(2838): glnE
atgttgccactttcttctgttttgcaaagccacgcgcagagtttgcctgaacgctggcatgaacatcctgaaaacctgcccctccccgatgatgaacagctggctgtgctgagcagcagtgaattcatgacggacagtttgctggcttttccgcagtggtggcatgaaattgtccaaaatccccctcaggcgcaggagtggcaactttaccgtcagtggctggatgaatcgctgacgcaggtgactgacgaagccgggttaatgaaagctttgcgtctgttccgccgccgtattctgacccgcattgcgtggtcacagtccgcgcaaaccagcgaagcaaaagatacgcttcaccagctgagtgaactggcggaattattgattgtcagcgcccgtgactggctgtatgccgcttgctgtcgcgagttcggtacgccggtcaatgccgcaggggaaccgcagagaatgctgatcctcgggatgggcaaactcggcggtggcgagctgaatttctcatcggacatcgacctgatttttgcttatccggaaaatggccagacacgcggcggtcggcgtgaactggataacgcacaatttttcacccggctcggccagcgtctgatcaaagcgctggatcagcccactatcgacggttttgtctatcgcgtggacatgcgtttgcgtccgttcggcgacagtggcccgctggtgatgagcttcccggcactggaagattattatcaggaacaggggcgcgactgggaacgctacgcaatggtgaaagcgcgtctgatgggcggcgcggaggacatcagcagtcaggaattgcgtaaaatgctgatgccttttgtcttccgccgttatatcgatttcagtgtgatccagtccctgcgtaacatgaaaggcatgatcgcccgcgaagtacgccgccgtggtctgaaagacaacatcaaactcggcgcaggcggtattcgtgaaattgaatttatcgtgcaggtatttcagctgatccgtggcggtcgtgaaccggcattgcagcagcgtgcgttgttgccaacgcttcaggcgctggaaaatctggggctgctgccggtagagcaggtgttgcagttgcgtaacagctatctgttcctgcgacgtctggaaaacctgttgcaggccattgctgacgagcaaacgcaaaccttaccgtccgatgagctgaatcaggcgcgtctggcgtgggggatgaattacgctggctggccgcagcttctggatgcagtgaatgctcacatgcaggccgtacgcgcggtatttaacgatctgattggcgatgacacgccagatgccgaagatgacgtgcaactctcccggttcagcagtttatggattgatacgcttgagcctgacgagctggctccgctggtgccgcaacttgacgaaaatgcgcaacggcatgttttacatcagattgctgattttcgccgtgacgtggataaacgcacgatagggccacgtgggcgtgatcagttggatttgctgatgccgcgtttactggcccaggtctgcacctataaaaatgcggatgtgacgttacagcgcctgatgcagttgctgctcaatatcgtcacgcgcacgacgtatatcgagctgctggtggaatatcccggtgcgctcaaacagttaatacgtctgtgcgctgcctcgccgatggtggcgacgcaacttgcgcgtcatcctttattgctcgacgaactgctcgacccgcgcacgctttaccagccgattgagccgggcgcgtaccgtgatgaactgcggcaatatctgatgcgggtgccaaccgaagacgaagaacaacagcttgaagccgtgcgccagttcaaacaggcacagcatttacgtattgcggccggggatatttccggtgcgttgccggtgatgaaagtcagtgaccatttaacctaccttgcggaggccattctcgacgttgtggtgcaacaggcgtgggaacaaatggtcgtaaaatacggtcagccaacccatcttcagcaccgtaaagggcgcggttttgccgtggtgggttacggaaaactcggtggctgggagctgggttacagctcggatctggatctggtcttcctgctcgattgcgcgccggaagtcatgaccgacggcgaacgcagcattgacgggcgtcagttttatctgcggctggcgcagcgcatcatgcatttattcagcacccgtacgtcgtcaggcattctttatgaggttgacccgcgtctgcggccttccggtgcttccggcatgctggtcagcaccatcgaagcttttgcggattatcaggccaacgaagcctggacatgggagcatcaggcgctggttcgcgcgcgtgtggtttatggtgatccgcaactgacgcagcaatttaatgccacgcgtcgcgacattctttgccgccagcgcgatgccgacggcttgcgtaaggaagtccgtgaaatgcgcgagaaaatgtatgcccatctgggcagcaaaagagccgacgagtttgatctgaaagccgatccgggtggcataacggatattgaattcatcgcacaatatctggttctgcgtttcgcgcatgatgagccgaagctgacccgctggtctgataacgtgcggattttcgaactgatggcgcgacatgacatcatgccggaagaggaagcacgccatctgacgcaggcttacgtgacattgcgcgatgaaattcatcatctggcgttgcaggaacacagcgggaaagtggccgcagacagctttgccactgagcgcgcgcaaatccgcgccagctgggcaaactggcttggctga

SEQ ID NO: 94 - DNA, 1290 bp, Rahnella aquatilis
  gene (1)..(1290): amtB
atgaaaaaacttttatccatgatggggcttggtgcagtggctttgctaccttcgcttgccatggcagcagcaccagcagcggcaaacggtgctgataacgcctttatgatgatttgtaccgcgctggtattgttcatgaccgtacccggtgtggcgttgttctacggcggcttactgcgttctaaaaacgttttgtccatgctgactcaggttattgttacctttgctctggtctgcgtcctgtggatcctctacggttacagccttgccttcagtgaaggtaacgcgttcttcggtggtttcagcaacgtaatgatgaaaggcattggcctggattctgtgactggcaccttctcgcagatgatccacgttgcattccagtgttcatttgcctgcatcactgtagcgctgatcgtaggtggtattgctgaacgtgtgcgtttctcagcagttctgattttcactgtgatctggctgactttctcttatattccgatggctcacatggtatgggcaggcggtttcctggctgctgacggtgcgctggactttgccggtggtaccgttgttcatatcaatgccgcaattgctggcctggtaggggcttatctgctgggtaaacgcgccggttttggcaaagaagctttcaaaccacacaacctgccaatggtcttcactggcgcctcaatcctgtatgtgggctggttcggcttcaatgcgggttcagcaagtgccgcaagctctgttgccgcgctggctttcctgaacactgtcattgctactgctggcgcaatcctgtcctggacgctggttgagtggatggtgcgcggtaagccctcactgctgggcgcaagctccggtgctatcgcaggtctggtggctatcacgcctgcatgtggtacggtcggcgtaggtggtgctctgattatcggtctggtaggcggtatcactggtctgtggggggttgttaccctgaaaaaatggctgcgtgttgatgacacctgtgatgtgttcggtgttcatggcgtgtgcggtatcgtaggttgtctgctgacgggtgtattcacgtccagttcacttggcggcgtgggctacgcagaaggcgtgaccatgggccatcaggtttgggtgcagttcttcagcgtgtgcgtaacattggtctggtcaggcgttgttgccttcatcggttacaaagtggctgacatgatcgtaggtctgcgtgttcctgaagaacaagaacgcgaaggtctggacgttaacagccacggcgaaaacgcttacaaccaataa

SEQ ID NO: 95 - DNA, 500 bp, Rahnella aquatilis
  gene (1)..(500): PinfC
tgaatatcactgactcacaagctacctatgtcgaagaattaactaaaaaactgcaagatgcaggcattcgcgttaaagccgacttgagaaatgagaagattggctttaaaattcgcgaacacacgctacgccgtgttccttatatgttagtttgtggcgataaagaggtcgaagcaggcaaagttgctgttcgtactcgtcgcggcaaagacttaggaagcatggatgttagcgaagtcgttgacaaactgctggcggaaatccgcagcagaagtcatcatcaactggaggaataaagtattaaaggcggaaaacgagttcaaccggcgcgtcctaatcgcattaacaaagagattcgcgcgcaagaagttcgcctcaccggcgtcgatggcgagcagattggtattgtcagtctgaatgaagctcttgaaaaagctgaggaagcgggcgtcgatttagtagaaatcagtccgaatgccgagccgccagtttgtcgaatc

SEQ ID NO: 96 - DNA, 1085 bp, Klebsiella variicola
  gene (1)..(1085): 16S
attgaagagtttgatcatggctcagattgaacgctggcggcaggcctaacacatgcaagtcgagcggtagcacagagagcttgctctcgggtgacgagcggcggacgggtgagtaatgtctgggaaactgcctgatggagggggataactactggaaacggtagctaataccgcataacgtcgcaagaccaaagtgggggaccttcgggcctcatgccatcagatgtgcccagatgggattagctagtaggtggggtaacggctcacctaggcgacgatccctagctggtctgagaggatgaccagccacactggaactgagacacggtccagactcctacgggaggcagcagtggggaatattgcacaatgggcgcaagcctgatgcagccatgccgcgtgtgtgaagaaggccttcgggttgtaaagcactttcagcggggaggaaggcggtgaggttaataacctcaccgattgacgttacccgcagaagaagcaccggctaactccgtgccagcagccgcggtaatacggagggtgcaagcgttaatcggaattactgggcgtaaagcgcacgcaggcggtctgtcaagtcggatgtgaaatccccgggctcaacctgggaactgcattcgaaactggcaggctagagtcttgtagaggggggtagaattccaggtgtagcggtgaaatgcgtagagatctggaggaataccggtggcgaaggcggccccctggacaaagactgacgctcaggtgcgaaagcgtggggagcaaacaggattagataccctggtagtccacgctgtaaacgatgtcgatttggaggttgtgcccttgaggcgtggcttccggagctaacgcgttaaatcgaccgcctggggagtacggccgcaaggttaaaactcaaatgaattgacgggggcccgcacaagcggtggagcatgtggtttaattcgatgcaacgcgaagaaccttacctggtcttgacatccacagaactttccagagatggattggtgccttcgggaactgtgagacaggtgctgcatggctgtcgtcagctcgtgttgtgaaatgttggg

SEQ ID NO: 97 - DNA, 882 bp, Klebsiella variicola
  gene (1)..(882): nifH1
atgaccatgcgtcaatgcgctatctacggtaaaggcggtatcggtaaatccaccaccacccagaatctcgtcgcggccctcgccgagatgggtaagaaagtgatgatcgtcggctgcgatccgaaagcggattccacccgtctgatcctccacgctaaagcccagaacaccatcatggagatggcggcggaagtgggctcggtcgaggatctggagctcgaagacgttctgcaaatcggctatggcgatgtccgttgcgccgaatccggcggcccggagccaggcgtcggctgcgccggacgcggggtgatcaccgccatcaacttcctcgaggaagaaggcgcctatgaagaagatttggatttcgtcttctatgacgtcctcggcgacgtggtctgcggcggcttcgctatgccgatccgcgaaaacaaagcccaggagatctacatcgtctgctccggcgagatgatggcgatgtatgccgccaacaatatctccaaagggatcgtgaagtacgccaaatccggcaaggtgcgcctcggcggcctgatctgtaactcgcgcaaaaccgaccgggaagacgaactgatcatcgccctggcggagaagcttggcacgcagatgatccacttcgttccccgcgacaacattgtgcagcgcgcggagatccgccggatgacggtgatcgagtacgacccgacctgtcagcaggcgaatgaatatcgtcaactggcgcagaagatcgtcaataacaccaaaaaagtggtgccgacgccgtgcaccatggacgagctggaatcgctgctgatggagttcggcatcatggaagaagaagacaccagcatcattggtaaaaccgccgctgaagaaaacgcggcctga

SEQ ID NO: 98 - DNA, 1113 bp, Klebsiella variicola
  gene (1)..(1113): nifH2
atggttaggaaaagtagaagtaaaaatacaaatatagaactaactgaacatgaccatttattaataagtcaaataaaaaagcttaaaacacaaaccacttgcttttttaataataaaggaggggttgggaagactacattagtagcaaatttaggagcagagctatcaataaactttagtgcaaaagttcttattgtggatgccgaccctcaatgtaatctcacgcagtatgtattaagtgatgaagaaactcaggacttatatgggcaagaaaatccagatagtatttatacagtaataagaccactatcctttggtaaaggatatgaaagtgacctccctataaggcatgtagagaatttcggttttgacataattgtcggtgaccctagacttgctttacaggaagaccttttagctggagactggcgagatgccaaaggcggtgggatgcgaggaattaggacaacttttgtatttgcagagttaattaagaaagctcgtgagctaaattatgattttgttttctttgacatgggaccatcattaggcgcaatcaacagggcagtattactggcaatggaattctttgtcgtcccaatgtcaatcgatgtattttcactatgggctattaaaaatattggctccacggtttcaatatggaaaaaagaattagacacagggattcggctctcagaggaacctagcgaattatcacaattatcacctcaaggaaaactaaagtttctcggttacgtcacccaacaacataaagaacgctctggatacgatacaattcagcttgagaatactgaggaagaaataaaatcgaaacgtcgggtaaaggcgtatgaagacattggagaggtgtttccttctaaaattactgagcatctttctaaactttatgcatcaaaagatatgaacccacaccttggagatatacgtcatttaggtagtttagctccgaaatcacaatcacaacacgttccgatgatatcagtgtctggtacaggaaattacaccagacttagaaaaagcgcgcgtgaactttatcgagatattgcaagaagatacttagagaacattcagactgctaatggcgagaaatag

SEQ ID NO: 99 - DNA, 1374 bp, Klebsiella variicola
  gene (1)..(1374): nifD1
atgaagggaaaggaaattctggcgctgctggacgaacccgcctgcgagcacaaccagaagcaaaaatccggctgcagcgcccctaagcccggcgctaccgccggcggttgcgccttcgacggcgcgcagataacgctcctgcccatcgccgacgtcgcgcacctggtgcacggccccatcggctgcgcgggcagctcgtgggataaccgcggcagcgtcagcgccggcccggccctcaaccggctcggctttaccaccgatcttaacgaacaggatgtgattatgggccgcggcgaacgccgcctgttccacgccgtgcgtcacatcgtcgaccgctatcatccggcggcggtctttatctacaacacctgcgtaccggcgatggagggcgatgacatcgaggcggtctgccaggccgcacagaccgccaccggcgtcccggtcatcgctattgacgccgccggtttctacggcagtaaaaatcttggcaaccgaatggcgggcgacgtgatgctcaggcaggtgattggccagcgcgaaccggccccgtggccagacaacacgccctttgccccggcccagcgccacgatatcggcctgattggcgaattcaatatcgccggcgagttctggcaggtccagccgctgctcgacgagctggggatccgcgtcctcggcagcctctccggcgacggccgctttgccgagatccagaccctgcaccgggcgcaggccaatatgctggtgtgctcgcgcgcgctgatcaacgtcgcccgggggctggagctgcgctacggcacgccgtggtttgaaggcagcttctacgggatccgcgccacctccgacgccttgcgccagctggcgacgctgctgggggatgacgacctgcgccgccgcaccgaggcgctgatcgcccgcgaagagcaggcggcggagcaggctcttgcgccgtggcgtgagcagctccgcgggcgcaaagtgctgctctataccggcggcgtgaaatcctggtcggtggtatcggccctgcaggatctcggcatgaccgtggtggccaccggcacgcgcaaatccaccgaggaggacaaacagcggatccgtgagctgatgggcgacgaggcggtgatgcttgaggagggcaatgcccgcaccctgctcgacgtggtgtaccgctatcaggccgacctgatgatcgccggcggacgcaatatgtacaccgcctggaaagcccggctgccgtttctcgatatcaatcaggagcgcgagcacgcctacgccggctatcagggcatcatcaccctcgcccgccagctctgtctgaccctcgccagccccgtctggccgcaaacgcatacccgcgccccgtggcgctag

SEQ ID NO: 100 - DNA, 1449 bp, Klebsiella variicola
  gene (1)..(1449): nifD2
atgaccaacgcaacaggcgaacgtaaccttgcgctcatccaggaagtcctggaggtgtttcccgaaaccgcgcgcaaagagcgcagaaagcacatgatgatcagcgatccgcagatggagagcgtcggcaagtgcattatctcgaaccgtaaatcgcagcccggggtgatgaccgtgcgcggctgcgcctatgcgggctcgaaaggggtggtgtttgggccaatcaaagacatggcccatatctcgcacggccccatcggctgcggccagtattcccgcgccggacggcgcaactactataccggcgtcagcggtgtcgacagcttcggcaccctgaacttcacctctgattttcaggagcgcgatattgttttcggcggcgataaaaagctgaccaaactgatcgaagagatggagctgctgttcccgctgaccaaagggatcaccatccagtcggagtgcccggtgggcctgatcggcgatgacatcagcgccgtagccaacgccagcagcaaggcgctggataaaccggtgatcccggtgcgctgcgaaggctttcgcggcgtatcgcaatcgctgggccaccatatcgccaacgacgtggtgcgcgactgggtgctgaacaatcgcgaagggcagccgtttgccagcaccccgtacgatgttgccatcattggcgattacaacatcggcggcgacgcctgggcctcgcgcattctgctggaagagatggggctgcgcgtagtggcgcagtggtccggcgacggcaccctggtggagatggagaacaccccattcgttaagcttaacctcgtccactgctaccgttcgatgaactatatcgcccgccatatggaggagaaacatcagatcccatggatggaatataacttcttcggcccgaccaaaatcgccgaatcgctgcgcaagatcgccgatcaatttgatgacaccattcgcgccaatgcggaagcggtgatcgccaaatatgaggggcagatggcggccatcatcgccaaatatcgcccgcggctggaggggcgcaaagtgctgctgtacatgggggggctgcggccgcgccacgtcatcggcgcctatgaggatctcgggatggagatcatcgccgccggctacgagtttgcccataacgatgattacgaccgcaccctgccggacctgaaagagggcaccctgctgtttgacgatgccagcagctatgagctggaggccttcgtcaaagcgctgaaacctgacctcatcggctccgggatcaaagagaaatatatcttccagaaaatgggggtgccgttccgccagatgcactcctgggactattccggcccctatcacggctatgacggcttcgccatctttgcccgcgatatggatatgaccctgaacaatccggcgtggaacgaactgactgccccgtggctgaagtctgcgtga

SEQ ID NO: 101 - DNA, 1386 bp, Klebsiella variicola
  gene (1)..(1386): nifK1
atggcagatattatccgcagtgaaaaaccgctggcggtgagcccgattaaaaccgggcaaccgctcggggcgatcctcgccagcctcgggctggcccaggccatcccgctggtccacggcgcccagggctgcagcgccttcgccaaagttttctttattcagcatttccatgacccggtgccgctgcagtcgacggccatggatccgaccgccacgatcatgggggccgacggcaatatcttcaccgcgctcgacaccctctgccagcgccacagcccgcaggccatcgtgctgctcagcaccggtctggcggaagcgcagggcagcgatatcgcccgggtggtgcgccagtttcgcgaggcgcatccgcgccataacggcgtggcgatcctcaccgtcaataccccggatttttttggctctatggaaaacggctacagcgcggtgatcgagagcgtgatcgagcagtgggtcgcgccgacgccgcgtccggggcagcggccccggcgggtcaacctgctggtcagccacctctgttcgccaggggatatcgaatggctgggccgctgcgtggaggcctttggcctgcagccggtgatcctgccggacctctcgcagtcaatggatggccacctcggtgaaggggattttacgcccctgacccagggcggcgcctcgctgcgccagattgcccagatgggccagagtctgggcagcttcgccattggcgtgtcgctccagcgggcggcatcgctcctgacccaacgcagccgcggcgacgtgatcgccctgccgcatctgatgaccctcgaccattgcgatacctttatccatcagctggcgaagatgtccggacgccgcgtaccggcctggattgagcgccagcgtggccagctgcaggatgcgatgatcgactgccatatgtggcttcagggccagcgcatggcgatggcggcggagggcgacctgctggcggcgtggtgtgatttcgcccgcagccaggggatgcagcccggcccgctggtcgcccccaccagccaccccagcctgcgccagctgccggtcgagcaagtcgtgccgggggatcttgaggatctgcagcagctgctgagccaccaacccgccgatctgctggtggctaactctcacgcccgcgatctggcggagcagtttgccctgccgctgatccgcgtcggttttcccctcttcgaccggctcggtgagtttcgtcgcgtccgccaggggtacgccggtatgcgagatacgctgtttgaactggccaatctgctgcgcgaccgccatcaccacaccgccctctaccgctcgccgcttcgccagggcgccgacccccagccggcttcaggagacgcttatgccgcccattaa

SEQ ID NO: 102 - DNA, 1563 bp, Klebsiella variicola
  gene (1)..(1563): nifK2
atgagccaaacgatcgataaaattcacagctgttatccgctgtttgaacaggatgaataccagaccctgttccagaataaaaagacccttgaagaggcgcacgacgcgcagcgtgtgcaggaggtttttgcctggaccaccaccgccgagtatgaagcgctgaacttccagcgcgaggcgctgaccgtcgacccggccaaagcctgccagccgctcggcgccgtactctgcgcgctggggttcgccggcaccctgccctacgtgcacggctcccagggctgcgtcgcctattttcgcacctactttaaccgccattttaaagagccggtcgcctgcgtctccgactccatgaccgaggacgcggcggtgttcggcggcaacaacaacatgaatctgggcctgcagaatgccagcgcgctgtataaacccgagattatcgccgtctccaccacctgtatggccgaggtgatcggcgacgatctgcaggcgtttatcgccaacgccaaaaaagagggatttgttgacgaccgcatcgccattccttacgcccatacccccagctttatcggcagccatgtcaccggctgggacaatatgttcgaagggttcgcgaagacctttaccgctgactacgccgggcagccgggcaaacagcaaaagctcaatctggtgaccggatttgagacctatctcggcaacttccgcgtgctgaagcggatgatggcgcagatggatgtcccgtgcagcctgctctccgacccatcagaggtgctcgacacccccgccgacggccattaccggatgtacgccggcggcaccagccagcaggagatcaaaaccgcgccggacgccattgacaccctgctgctgcagccgtggcagctggtgaaaagcaaaaaggtggttcaggagatgtggaaccagcccgccaccgaggtggccgttccgctgggcctggccgccaccgacgcgctgctgatgaccgtcagtcagctgaccggcaaaccgatcgccgacgctctgaccctggagcgcggccggctggtcgacatgatgctggattcccacacctggctgcatggcaaaaaattcggcctctacggcgatccggatttcgtgatggggctgacgcgcttcctgctggagctgggctgcgagccgacggtgatcctcagtcataacgccaataaacgctggcaaaaagcgatgaagaaaatgctcgatgcctcgccgtacggtcaggaaagcgaagtgttcatcaactgcgacctgtggcacttccggtcgctgatgttcacccgtcagccggactttatgatcggtaactcctacggcaagtttatccagcgcgataccctggcaaagggcaaagccttcgaagtgccgctgatccgtctgggctttccgctgttcgaccgccatcatctgcaccgccagaccacctggggctatgaaggcgcaatgaacatcgtcacgacgctggtgaacgccgtgctggaaaaactggaccacgacaccagccagttgggcaaaaccgattacagcttcgacctcgttcgttaa

SEQ ID NO: 103 - DNA, 1485 bp, Klebsiella variicola
  gene (1)..(1485): nifL
atgaccctgaatatgatgctcgataacgccgcgccggaggccatcgccggcgcgctgactcaacaacatccggggctgttttttaccatggtggaacaggcctcggtggccatctccctcaccgatgccagcgccaggatcatttacgccaacccggcgttttgccgccagaccggctattcgctggcgcaattgttaaaccagaacccgcgcctgctggccagcagccagacgccgcgcgagatctatcaggagatgtggcataccctgctccagcgtcagccctggcgcggtcagctgattaatcagcgtcgggacggcggcctgtacctggtggagattgacatcaccccggtgcttagcccgcaaggggaactggagcattatctggcgatgcagcgggatatcagcgtcagctacaccctcgaacagcggctgcgcaaccatatgaccctgatggaggcggtgctgaataatatccccgccgccgtggtagtggtggacgagcaggatcgggtggtgatggacaacctcgcctacaaaaccttctgcgctgactgcggcggccgggagctgctcaccgagctgcaggtctcccctggccggatgacgcccggcgtggaggcgatcctgccggtggcgctgcgcggggccgcgcgctggctgtcggtaacctgctggccgttgcccggcgtcagtgaagaggccagccgctactttatcgacagcgcgctggcgcggaccctggtggtgatcgccgactgtacccagcagcgtcagcagcaggagcaagggcgccttgaccggctgaagcagcaaatgaccgccggcaagctgctggcggcgatccgcgagtcgctggacgccgcgctgatccagctgaactgcccgattaatatgctggcggcagcccgtcggctgaacggcgagggaagcgggaatgtggcgctggaggccgcctggcgtgaaggggaagaggcgatggcgcggctccagcgctgtcgcccatcgctggaactcgaaaaccccgccgtctggccgctgcagccctttttcgacgatctgtgcgccctctaccgtacacgcttcgatcccgacgggctgcaggtcgacatggcctcaccgcatctgatcggctttggccagcgcaccccactgctggcgtgcttaagcctgtggctcgatcgcaccctggccctcgccgccgaactcccctccgtgccgctggcgatgcagctctacgccgaggagaacgacggctggctgtcgctgtatctgactgacaacgtaccgctgctgcaggtgcgctacgctcactcccccgacgcgctgaactcgccgggcaaaggcatggagctgcggctgatccagaccctggtggcgcaccatcgcggggccattgagctggcttcccgaccgcagggcggcacctgcctgaccctgcgtttcccgctgtttaacaccctgaccggaggtgaagcatga

SEQ ID NO: 104 - DNA, 1575 bp, Klebsiella variicola
  gene (1)..(1575): nifA
atgatccctgaatccgacccggacaccaccgtcagacgcttcgacctctctcagcagttcaccgccatgcagcggataagcgtggtgctgagccgggccaccgaggccagcaaaacgctgcaggaggtgctcagcgtattacacaacgatgcctttatgcagcacgggatgatctgcctgtacgacagcgagcaggagatcctcagtatcgaagcgctgcagcaaaccggccagcagcccctccccggcagcacgcagatccgctatcgccccggcgagggactggtggggaccgtgctggcccaggggcagtcgctggtgctgccccgggtcgccgacgatcagcgttttctcgaccgcctgagcctctacgattacgatctgccgtttatcgccgtaccgttgatggggcccaacgcccggccaataggggtgctggcggcccagccgatggcgcgccaggaagagcggctgccggcctgcacccgttttctcgaaaccgtcgccaacctcgtcgcccagaccatccggctgatgatccttccggcctcacccgccctgtcgagccgccagccgccgaaggtggaacggccgccggcctgctcgtcgtcgcgcggcgtgggccttgacaatatggtcggcaagagcccggcgatgcgccagatcgtggaggtgatccgtcaggtttcgcgctgggacaccaccgtgctggtacgcggcgaaagcggcaccgggaaagagctgatcgccaacgccatccatcaccattcgccacgggctggcgccgccttcgtcaaatttaactgcgcggcgctgccggacaccctgctggaaagcgaactgttcggccatgagaaaggcgcctttaccggggcggtgcgtcagcgtaaaggacgttttgagctggcggatggcggcaccctgttcctcgatgagattggtgaaagcagcgcctcgttccaggccaagctgctgcgtatcctccaggagggggagatggagcgggtcggcggcgatgagaccctgcgggtgaatgtccgcatcatcgccgccaccaaccgtcacctggaggaggaggtccggctgggccatttccgcgaggatctctactatcgtctgaacgtgatgcccatcgccctgcccccgctgcgcgagcgtcaggaggacatcgccgagctggcgcacttcctggtgcgcaaaatcggccagcatcaggggcgcacgctgcggatcagcgagggcgcgatccgcctgctgatggagtacagctggccgggtaacgttcgcgaactggagaactgcctcgaacgatcggcggtgatgtcggagagtggcctgatcgatcgcgacgtgatcctcttcactcaccaggatcgtcccgccaaagccctgcctgccagcgggccagcggaagacagctggctggacaacagcctggacgaacgtcagcgactgatcgccgcgctggaaaaagccggctgggtgcaggccaaggcggcacggctgctggggatgacgccgcgccaggtcgcttatcggatccagatcatggatatcaccctgccgcgtctgtag

SEQ ID NO: 105 - DNA, 2838 bp, Klebsiella variicola
  gene (1)..(2838): glnE
atgatgccgctttctccgcaattacagcagcactggcagacggtcgctgaccgtctgccagcggattttcccattgccgaactgagcccacaggccaggtcggtcatggcgttcagcgattttgtcgaacagagtgtgatcgcccagccgggctggctgaatgagcttgcggactcctcgccggaggcggaagagtggcggcattacgaggcctggctgcaggatcgcctgcaggccgtcactgacgaagcggggttgatgcgagagctgcgtctcttccgccgccagatgatggtccgcatcgcctgggcgcaggcgctgtcgctggtgagcgaagaagagactctgcagcagctgagcgtcctggcggagaccctgattgtcgccgcccgcgactggctgtacgccgcctgctgtaaggagtggggaacgccatgcaatgccgagggccagccgcagccgctgctgatcctcgggatgggaaagctgggcggcggcgagctgaacttctcttccgatatcgatctgatctttgcctggcctgagcatggcgccacccgcggcggccgccgcgagctggataacgcccagttctttacccgtctggggcagcggctgatcaaggcccttgaccagccgacgcaggacggctttgtctatcgggttgacatgcgcctgcggccgtttggcgacagtgggccgctggtactcagttttgcggcgctggaagattattaccaggagcagggtcgggactgggaacgctatgcgatggtgaaagcgcggatcatgggcgataacgacggcgtgtacgccagcgagttgcgcgcgatgctccgtcctttcgtcttccgccgttatatcgacttcagcgtgatccagtcgctgcgtaacatgaaaggcatgatcgcccgcgaagtgcggcgtcgcgggctgaaagacaacatcaagctcggcgccggcgggatccgtgaaattgagtttatcgttcaggtctttcaactgatccgcggtggtcgcgaacctgcactgcagcagcgcgccctgctgccgacgctggcggcgattgatgagctacatctgctgccggaaggcgacgcggcgctgctgcgcgaggcctatctgttcctgcgccggctggaaaacctgctgcaaagcatcaacgatgagcagacccagaccctgccgcaggatgaacttaaccgcgccaggctggcgtgggggatgcataccgaagactgggagacgctgagcgcgcagctggcgagccagatggccaacgtgcggcgagtgtttaatgaactgatcggcgatgatgaggatcagtccccggatgagcaactggccgagtactggcgcgagctgtggcaggatgcgctggaagaagatgacgccagcccggcgctggcgcatttaaacgataccgaccgccgtagcgtgctggcgctgattgccgattttcgtaaagagctggatcggcgcaccatcggcccgcgcggccgccaggtgctggatcagctgatgccgcatctgctgagcgaaatctgctcgcgcgccgatgcgccgctgcctctggcgcggatcacgccgctgttgaccgggatcgtcacccgtaccacctatcttgagctgctgagcgaattccccggcgcgctgaagcacctgatcacgctctgcgcggcgtcgccgatggtcgccagccagctggcgcgccacccgctgctgctggatgagctgctggatcccaacaccctctatcagccgacggcgaccgatgcctatcgcgacgagctgcgccagtacctgctgcgcgtgccggaagaggatgaagagcagcagctggaggcgttgcgccagtttaagcaggcgcagcagctgcatatcgcggcggcggatatcgctggtaccctgccggtgatgaaggtcagcgatcacttaacctggcttgccgaagcgatcctcgacgcggtggtgcagcaggcatgggggcagatggtcgctcgctacggccagccgacccacctgcacgatcgccagggtcgcggcttcgccgtcgtcggctacggtaagcttggcggctgggagctgggctacagctccgatctcgatctggtgttcctccatgactgcccggcggaggtgatgaccgacggcgagcgggagattgacggccgtcagttctacctgcggctggcccagcggatcatgcacctgttcagcacccgcacctcgtccggtattctctacgaagtggacgcccggctgcgtccttctggcgcggcggggatgctggtcaccaccgccgacgcgtttgctgactatcagcagaacgaagcctggacgtgggaacatcaggcgctggtgcgcgcccgcgtggtctatggcgacccggcgctgcaggcgcgctttgacgccattcgtcgcgatatcctgaccaccccgcgggaggggatgaccctgcagaccgaggttcgcgagatgcgcgagaagatgcgcgcccaccttggcaacaaacatcccgatcgttttgatatcaaagccgatgccggcgggatcaccgatattgaatttattactcagtatctggtcctacgctatgccagtgacaagccgaagctgacccgctggtctgacaacgtgcgtattcttgagctgctggcgcagaacgacatcatggacgaggaggaggcgcgcgccttaacgcatgcgtacaccaccttgcgtgatgcgctccatcacctggccctgcaggagcagccgggacacgtggcgccagaggccttcagccgggagcgtcagcaggtcagcgccagctggcagaagtggctgatggcttaa

SEQ ID NO: 106 - DNA, 500 bp, Klebsiella variicola
  gene (1)..(500): PinfC
agcgtcaggtaccggtcatgattcaccgtgcgattctcggttccctggagcgcttcattggcatcctgaccgaagagttcgctggcttcttcccaacctggattgcaccagtgcaggtagtggtcatgaatattaccgattctcaggctgaatacgttaacgaattgacgcgtaaactacaaaatgcgggcattcgtgtaaaagcagacttgagaaatgagaagattggctttaaaatccgcgagcacactttacgtcgtgtcccgtatatgttggtctgtggcgacaaagaagtcgaagccggcaaagtggccgtgcgcacccgtcgcgggaaagacctcggcagcatggacgtaagtgaagtgattgagaagctgcaacaagagattcgcagccgcagtcttcaacaactggaggaataaggtattaaaggcggaaaacgagttcaaacggcacgtccgaatcgtatcaatggcgagattcgcgccctggaagttcgc

SEQ ID NO: 107 - DNA, 1287 bp, Klebsiella variicola
  gene (1)..(1287): amtB
atgaaaatggcaacaatgaaatcgggtctgggggcattagcccttcttccgggactggcaatggccgcgcccgcagtggcggacaaagccgataacgcgtttatgatgatttgcaccgcgctggttctgtttatgaccatcccggggatcgcgctgttttacggcggcctgatccgcggcaaaaacgtcctttccatgctgactcaggtgattgtgacctttggcctggtctgcgtactgtgggtgatttatggctataccctggccttcggcaccggcggcagcttcttcggtagttttgactgggtgatgctgaaaaatattgaactgaaagcgctgatgggcaccttctatcagtacatccacgtggccttccagggctcgttcgcctgtatcaccgtcgggctgatcgtgggggcgctggctgagcgtattcgtttctccgccgtgctgatttttgtggtggtgtggatgacgctctcttatgttccgattgcgcacatggtctggggcggcggtctgctggcgacccacggcgcgctggacttcgcgggcggcaccgttgtacacatcaacgccgcggttgccgggctggtgggtgcgtacatgatgggcaaacgtgtgggcttcggcaaagaagcgttcaaaccgcacaatctgccgatggtgttcaccggaaccgccatcctctacgtgggctggttcggcttcaacgccggctccgccagcgcagcgaacgaaattgccgcattggctttcgtcaacaccgtcgtcgccacagcggctgccatcctggcgtggacctttggcgaatgggccctgcgcggtaaaccttcactgctgggcgcctgctccggggcgattgccggtctggttggcgtcacaccagcctgtgggtatatcggtgtcggtggggcgttgattgtgggtatcgcatctggtctggcgggcatctggggcgtaacggcgctgaaacgctggctgcgggttgatgacccttgcgacgtcttcggcgtccacggcgtctgcggcatcgtcggctgtatcctgaccggtatcttcgcggccacctctctgggcggcgtgggttatgcagaaggcgtcaccatgggccatcagctgctggtgcaactcgagagtatcgcgattaccatcgtctggtcgggcgttgtcgctttcattggctacaaagtggcggacatgaccgtggggctgcgcgtaccagaagagcaggagcgcgaaggactggacgtcaacagccatggcgaaaacgcctacaacgcctga

SEQ ID NO: 108 - DNA, 299 bp, Klebsiella variicola
  gene (1)..(299): Prm8.2
cgccgtcctcgcagtaccattgcaaccgactttacagcaagaagtgattctggcacgcatggaacaaattcttgccagtcgggctttatccgatgacgaacgcgcacagcttttatatgagcgcggagtgttgtatgatagtctcggtctgagggcattagcgcgaaatgatttttcacaagcgctggcaatccgacccgatatgcctgaagtattcaattacttaggcatttacttaacgcaggcaggcaattttgatgctgcctatgaagcgtttgattctgtacttgagcttgatc

SEQ ID NO: 109 - DNA, 300 bp, Klebsiella variicola
  gene (1)..(300): Prm6.2
gctaaagttctcggctaatcgctgataacatttgacgcaatgcgcaataaaagggcatcatttgatgccctttttgcacgctttcataccagaacctggctcatcagtgattttttttgtcataatcattgctgagacaggctctgaagagggcgtttatacaccaaaccattcgagcggtagcgcgacggcaagtcagcgttctcctttgcaatagcagggaagaggcgccagaaccgccagcgttgaagcagtttgaacgcgttcagtgtataatccgaaacttaatttcggtttgga

SEQ ID NO: 110 - DNA, 400 bp, Klebsiella variicola
  gene (1)..(400): Prm1.2
gcccgctgaccgaccagaacttccaccttggactcggctatacccttggcgtgacggcgcgcgataactgggactacatccccattccggtgatcttaccattggcgtcaataggttacggtccggcgactttccagatgacctatattcccggcacctacaataacggtaacgtttacttcgcctgggctcgtatacagttttaattcgctaagtcttagcaataaatgagataagcggtgtgtcttgtggaaaaacaaggactaaagcgttacccactaaaaaagatagcgacttttatcactttttagcaaagttgcactggacaaaaggtaccacaattggtgtactgatactcgacacagcattagtgtcgatttttcatataaaggtaattttg

SEQ ID NO: 111 - DNA, 1536 bp, Klebsiella variicola
  gene (1)..(1536): 16S
  misc_feature (245)..(245): n is a, c, t, g, unknown or other
  misc_feature (452)..(452): n is a, c, t, g, unknown or other
  misc_feature (454)..(454): n is a, c, t, g, unknown or other
  misc_feature (1131)..(1132): n is a, c, t, g, unknown or other
ttgaagagtttgatcatggctcagattgaacgctggcggcaggcctaacacatgcaagtcgagcggtagcacagagagcttgctctcgggtgacgagcggcggacgggtgagtaatgtctgggaaactgcctgatggagggggataactactggaaacggtagctaataccgcataacgtcgcaagaccaaagtgggggaccttcgggcctcatgccatcagatgtgcccagatgggattagctngtaggtggggtaacggctcacctaggcgacgatccctagctggtctgagaggatgaccagccacactggaactgagacacggtccagactcctacgggaggcagcagtggggaatattgcacaatgggcgcaagcctgatgcagccatgccgcgtgtgtgaagaaggccttcgggttgtaaagcactttcagcggggaggaaggcgntnaggttaataaccttgtcgattgacgttacccgcagaagaagcaccggctaactccgtgccagcagccgcggtaatacggagggtgcaagcgttaatcggaattactgggcgtaaagcgcacgcaggcggtctgtcaagtcggatgtgaaatccccgggctcaacctgggaactgcattcgaaactggcaggctagagtcttgtagaggggggtagaattccaggtgtagcggtgaaatgcgtagagatctggaggaataccggtggcgaaggcggccccctggacaaagactgacgctcaggtgcgaaagcgtggggagcaaacaggattagataccctggtagtccacgctgtaaacgatgtcgatttggaggttgtgcccttgaggcgtggcttccggagctaacgcgttaaatcgaccgcctggggagtacggccgcaaggttaaaactcaaatgaattgacgggggcccgcacaagcggtggagcatgtggtttaattcgatgcaacgcgaagaaccttacctggtcttgacatccacagaactttccagagatggattggtgccttcgggaactgtgagacaggtgctgcatggctgtcgtcagctcgtgttgtgaaatgttgggttaagtcccgcaacgagcgcaacccttatcctttgttgccagcggtnnggccgggaactcaaaggagactgccagtgataaactggaggaaggtggggatgacgtcaagtcatcatggcccttacgaccagggctacacacgtgctacaatggcatatacaaagagaagcgacctcgcgagagcaagcggacctcataaagtatgtcgtagtccggattggagtctgcaactcgactccatgaagtcggaatcgctagtaatcgtagatcagaatgctacggtgaatacgttcccgggccttgtacacaccgcccgtcacaccatgggagtgggttgcaaaagaagtaggtagcttaaccttcgggagggcgcttaccactttgtgattcatgactggggtgaagtcgtaacaaggtaaccgtaggggaacctgcggttggatcacctcctt

SEQ ID NO: 112 - DNA, 882 bp, Klebsiella variicola
  gene (1)..(882): nifH
atgaccatgcgtcaatgcgctatctacggtaaaggcggtatcggtaaatccaccaccacccagaatctcgtcgcggccctcgccgagatgggtaagaaagtgatgatcgtcggctgcgatccgaaagcggactccacccgtctgatccttcacgctaaagcccagaacaccatcatggagatggcggcggaagtgggctcggtcgaggatctggagctcgaagacgttctgcaaatcggctatggcgatgtccgttgcgccgaatccggcggcccggagccaggcgtcggctgcgccggacgcggggtgatcaccgccatcaacttcctcgaggaagaaggcgcctatgaggaagatttggatttcgtcttctatgacgtcctcggcgacgtagtctgcggcggcttcgccatgccgatccgcgaaaacaaagcccaggagatctacatcgtctgctccggcgagatgatggcgatgtatgccgccaacaatatctccaaggggatcgtgaagtacgcgaaatctggcaaggtgcgcctcggcggcctgatctgtaactcgcgcaaaaccgaccgggaagacgaactgatcatcgccctggcggagaagcttggcacgcagatgatccacttcgttccccgcgacaacattgtgcagcgcgcggagatccgccggatgacggtgatcgagtacgacccgacctgtcagcaggcgaatgaatatcgtcaactggcgcagaagatcgtcaataacaccaaaaaagtggtgccaacgccgtgcaccatggacgagctggaatcgctgctgatggagttcggcatcatggaagaagaagacaccagcatcattggtaaaaccgccgctgaagaaaacgcggcctga

SEQ ID NO: 113 - DNA, 1449 bp, Klebsiella variicola
  gene (1)..(1449): nifD1
atgaccaacgcaacaggcgaacgtaaccttgcgctcatccaggaagtcctggaggtgtttcccgaaaccgcgcgcaaagagcgcagaaagcacatgatgatcagcgatccgcagatggagagcgtcggcaagtgcattatctcgaaccgtaaatcgcagcccggggtgatgaccgtgcgtggctgcgcctatgcgggctcgaaaggggtggtgtttgggccaatcaaagacatggcccatatctcgcacggccccatcggctgcggccagtactcgcgcgccggacggcgcaactactataccggcgtcagcggtgtcgacagcttcggcaccctgaacttcacctctgattttcaggagcgcgatattgttttcggcggcgataaaaagctgaccaaactgatcgaagagatggagctgctgttcccgctgaccaaagggatcaccatccagtcggagtgcccggtgggcctgatcggcgatgacatcagcgccgtggccaacgccagcagcaaggcgctggataaaccggtgatcccggtgcgctgcgaaggctttcgcggcgtatcgcaatcgctgggccaccatatcgccaacgacgtggtgcgcgactgggtgctgaacaatcgcgaagggcagccgtttgccagcaccccgtatgatgttgccatcattggcgattacaacatcggcggcgacgcctgggcctcgcgcattctgctggaagagatggggctgcgcgtagtggcgcagtggtccggcgacggcaccctggtggagatggagaacaccccattcgttaagcttaacctcgtccactgctaccgttcgatgaactatatcgcccgccatatggaggagaaacatcagatcccgtggatggaatataacttcttcggcccgaccaaaatcgccgaatcgctgcgcaagatcgccgatcaatttgatgacaccattcgcgccaatgcggaagcggtgatcgccaaatatgaggggcagatggcggccatcatcgccaaatatcgcccgcggctggaggggcgcaaagtgctgctgtacatgggggggctgcggccgcgccacgtcatcggcgcctatgaggatctcgggatggagatcatcgccgccggctacgagtttgcccataacgatgattacgaccgcaccctgccggacctgaaagagggcaccctgctgtttgacgatgccagcagctatgagctggaggccttcgtcaaagcgctgaaacctgacctcatcggctccgggatcaaagagaaatatatcttccagaaaatgggggtgccgttccgccagatgcactcctgggactattccggcccctatcacggctatgacggcttcgccatctttgcccgcgatatggatatgaccctgaacaatccggcgtggaacgaactgactgccccgtggctgaagtctgcgtga

SEQ ID NO: 114 - DNA, 1374 bp, Klebsiella variicola
  gene (1)..(1374): nifD2
atgaagggaaaggaaattctggcgctgctggacgaacccgcctgcgagcacaaccagaagcaaaaatccggctgcagcgctcctaagcccggcgcaaccgccggcggctgcgccttcgacggcgcgcagataacgctcctgcccatcgccgacgtcgcgcacctggtgcacggccccatcggctgcgcgggcagctcgtgggataaccgcggcagcgtcagcgccggcccggccctcaaccggctcggctttaccaccgatcttaacgaacaggatgtgattatgggccgcggcgaacgccgcctgttccacgccgtccgtcacatcgtcgaccgctatcatccggcggcggtctttatctacaacacctgcgtaccggcgatggagggggatgacctggaggccgtctgccaggccgcacagaccgccaccggcgtcccggtcatcgccattgacgccgccggtttctacggcagtaaaaatcttggcaaccgaatggcgggcgacgtgatgctcaggcaggtgattggccagcgcgaaccggccccgtggccagacaacacgccctttgccccggcccagcgccacgatatcggcctgattggcgaattcaatatcgccggcgagttctggcaggtccagccgctgctcgacgagctggggatccgcgtcctcggcagcctctccggcgacggccgctttgccgagatccagaccctgcaccgggcgcaggccaatatgctggtgtgctcgcgcgcgctgatcaacgtcgcccgggggctggagctgcgctacggcacgccgtggtttgaaggcagcttctacgggatccgcgccacctccgacgccttgcgccagctggcggcgctgctgggggatgacgacctgtgccgccgcaccgaggcgctgatcgcccgcgaagagcaggcggcggagcaggcgctggcgccgtggcgcgagcagctccgtgggcgcaaagtgttgctctacaccggcggcgtgaaatcctggtcggtggtatcagccctgcaggatctcggcatgaccgtggtggccaccggcacgcggaaatccaccgaggaggacaaacagcggatccgtgagctgatgggcgacgaggcggtgatgcttgaggagggcaatgcccgcaccctgctcgacgtggtgtaccgctatcaggccgacctgatgatcgccggcggacgcaatatgtacaccgcctggaaagcccggctgccgtttctcgatatcaatcaggagcgcgagcacgcctacgccggctatcagggcatcatcaccctcgcccgccagctctgtctgaccctcgccagtcccgtctggccgcaaacgcatacccgcgccccgtggcgctag

SEQ ID NO: 115 - DNA, 1386 bp, Klebsiella variicola
  gene (1)..(1386): nifK1
atggcagacattatccgcagtgaaaaaccgctggcggtgagcccgattaaaaccgggcaaccgctcggggcgatcctcgccagcctcgggctggcccaggccatcccgctggtccacggcgcccagggctgcagcgccttcgccaaagttttctttattcagcatttccatgacccggtgccgctgcagtcgacggccatggatccgaccgccacgatcatgggggccgacggcaatatcttcaccgcgctcgacaccctctgccagcgccacagcccgcaggccatcgtgctgctcagcaccggtctggcggaagcgcagggcagcgatatcgcccgggtggtgcgccagtttcgtgaggcgcatccgcgccataacggcgtggcgatcctcaccgtcaataccccggatttttttggctcgatggaaaacggctacagcgcggtgatcgagagcgtgatcgagcagtgggtcgcgccgacgccgcgtccggggcagcggccccggcgggtcaacctgctggtcagccacctctgttcgccaggggatatcgaatggctgggccgctgcgtggaggcctttggcctgcagccggtgatcctgccggacctctcgcagtcaatggatggccacctcggtgaaggggattttacgcccctgacccagggcggcgcctcgctgcgccagattgcccagatgggccagagtctgggcagcttcgccattggcgtgtcgctccagcgggcggcatcgctcctgacccaacgcagccgcggcgacgtgatcgccctgccgcatctgatgaccctcgaccattgcgatacctttatccatcagctggcgaagatgtccggacgccgcgtaccggcctggattgagcgccagcgcggccagctgcaggatgcgatgatcgactgccatatgtggcttcagggccagcgcatggcgatggcggcggagggcgacctgctggcggcgtggtgtgatttcgcccgcagccaggggatgcagcccggcccgctggtcgcccccaccagccaccccagcctgcgccagctgccggtcgatcaggtcgtgccgggggatcttgaggatctgcagcagctgctgagccaccaacccgccgatctgctggtggctaactctcacgcccgcgatctggcggagcagtttgccctgccgctgatccgcgtcggttttcccctcttcgaccggctcggtgagtttcgtcgcgtccgccaggggtacgccggtatgcgagatacgctgtttgagctggccaatctgctgcgcgaccgccatcaccacaccgccctctaccgctcgccgcttcgccagggcgccgaccccctgccggcttcaggagacgcttatgccgcccattaa

SEQ ID NO: 116 - DNA, 183 bp, Klebsiella variicola
  gene (1)..(183): nifK2
gtgccgctgatccgtctgggctttccgctgttcgaccgccatcatctgcaccgccagaccacctggggctatgaaggcgcaatgaacatcgtcacgacgctggtgaacgccgtgctggaaaaactggaccacgacaccagccagttgggcaaaaccgattacagcttcgacctcgttcgttaa

SEQ ID NO: 117 - DNA, 1485 bp, Klebsiella variicola
  gene (1)..(1485): nifL
atgaccctgaatatgatgctcgataacgccgcaccggaggccatcgccggcgcgctgactcaacaacatccggggctgttttttaccatggtggaacaggcctcggtggccatatccctcaccgatgccagcgccaggatcatttacgccaacccagcgttttgccgccagaccggctattcgctggcgcaattgttaaaccagaacccgcgcctgctggccagcagccagacgccgcgcgcgatctatcaggagatgtggcataccctgctccagcgtcagccctggcgcggtcagctgattaatcagcgtcgggacggcggcctgtgcctggtggagattgacatcaccccggtgcttagcccgcaaggggaactggagcattatctggcgatgcagcgggatatcagcgtcagctacaccctcgaacaacggctgcgcaaccatatgaccctgatggaggcggtgctgaataatatccccgccgccgtggtggtggtggacgagcaggatcgggtggtgatggacaacctcgcctacaaaaccttctgcgctgactgcggcggccgggagctgctcaccgagctgcaggtctcccctggccggatgacgcccggcgtggaggcgatcctgccggtagcgctgcgcggggccgcgcgctggctgtcggtaacctgctggccgttgcccggcgtcagtgaagaggccagccgctactttatcgacagcgcgctggcgcggaccctggtggtgatcgccgactgtacccagcagcgtcagcagcaggagcaaggacgccttgaccggctgaagcagcaaatgaccgccggcaagctgctggcggcgatccgcgagtcgctggacgccgcgctgatccagctgaactgcccgattaatatgctggcggcagcccgtcggctgaacggcgagggaagcgggaatgtggcgctggaggccgcctggcgtgaaggggaagaggcgatggcgcggctccagcgctgtcgcccatcgctggaactcgaaaaccccgccgtctggccgctgcagccctttttcgacgatctgtgcgccctctaccgtacccgcttcgatcccgacgggctgcaggtcgacatggcctcaccgcatctgatcggctttggccagcgcaccccgctgctggcgtgcttaagcctgtggctcgaccgcaccctggccctcgccgccgaattgccctccgtgccgctggcgatgcagctctatgccgaggagaacgacggctggctgtcgctgtacctgactgataacgtaccgctgttgcaggtgcgctacgcccactcccccgacgcgctgaactcgccgggtaaaggcatggagctgcggctgatccagaccctggtggcgcaccatcgcggggccattgagctggcttcccgaccgcagggcggcacctgcctgaccctgcgtttcccgctgtttaacaccctgaccggaggtgaagcatga

SEQ ID NO: 118 - DNA, 1575 bp, Klebsiella variicola
  gene (1)..(1575): nifA
atgatccctgaatccgacccggacaccaccgtcagacgcttcgacctctctcagcagttcaccgccatgcagcggataagcgtggtgctgagccgggccaccgaggccagcaaaacgctgcaggaggtactcactgtattgcacaacgatgcctttatgcagcacgggatgatctgcctgtacgacagcgagcaggagatcctcagtatcgaagcgctgcagcaaaccggccagcagcccctccccggcagcacgcagatccgctatcgccccggcgagggactggtggggaccgtgctggcccaggggcagtcgctggtgctgccccgggtcgccgacgatcagcgttttctcgaccgcctgagcctctacgattacgatctgccgtttatcgccgtaccgttgatggggcccaacgcccggccaataggggtgctggcggcccagccgatggcgcgccaggaagagcggctgccggcctgcacccgttttctcgaaaccgtcgccaacctcgtcgcccagaccatccggctgatgatccttccggcctcacccgccctgtcgagccgccagccgccgaaggtggaacggccgccggcctgctcgtcgtcgcgcggcgtgggccttgacaatatggtcggcaagagcccggcgatgcgccagatcgtggaggtgatccgtcaggtttcgcgctgggacaccaccgtgctggtgcgcggtgaaagcggcaccgggaaagagctgatcgccaacgccatccatcaccattcgccacgggctggcgccgccttcgtcaaatttaactgcgcggcgctgccggacaccctgctggaaagcgaactgttcggccatgagaaaggcgcctttaccggggcggtgcgtcagcgtaaaggacgttttgagctggcggatggcggcaccctgttcctcgatgagattggtgaaagcagcgcctcgttccaggccaagctgctgcgtatcctccaggagggggagatggagcgggtcggcggcgatgagaccctgcgggtgaatgtccgcatcatcgccgccaccaaccgtcacctggaggaggaggtccggctgggccatttccgcgaggatctctattatcgtctgaacgtgatgcccatcgccctgcccccgctgcgcgagcgtcaggaggacatcgccgagctggcgcacttcctggtgcgcaaaatcggccagcatcaggggcgcacgctgcggatcagcgagggcgcgatccgcctgctgatggagtacagctggccgggtaacgttcgcgaactggagaactgcctcgaacgatcggcggtgatgtcggagagtggcctgatcgatcgcgacgtgatcctcttcactcaccaggatcgtcccgccaaagccctgcctgccagcgggccagcggaagacagctggctggacaacagcctggacgaacgtcagcgactgatcgccgcgctggaaaaagccggctgggtgcaggccaaggcggcacggctgctggggatgacgccgcgccaggtcgcttaccggatccagatcatggatatcaccctgccgcgtctgtag

SEQ ID NO: 119 - DNA, 2838 bp, Klebsiella variicola
  gene (1)..(2838): glnE
atgatgccgctttctccgcaattacagcagcactggcagacggtcgctgaccgtctgccagcggattttcccattgcagaactgagcccacaggccaggtcggtcatggcgttcagcgattttgtcgaacagagtgtgatcgcccagccgggctggctgaatgagcttgcggactcctcgccggaggcggaagagtggcggcattacgaggcctggctgcaggatcgcctgcaggccgtcactgacgaagcggggttgatgcgagagctgcgtctcttccgccgccagatgatggtccgcatcgcctgggcgcaggcgctgtcgctggtgagcgaagaagagaccctgcagcagctgagcgccctggcggagaccctgattgtcgccgcccgcgactggctctacgccgcctgctgtaaggagtggggaacgccatgcaatgccgagggccagccgcagccgctgctgatcctcgggatgggaaagctgggcggcggcgagctgaacttctcttccgatatcgatctgatctttgcctggcctgagcatggcgccacccgcggcggccgccgcgagctggataacgcccagttctttacccgtctggggcagcggctgatcaaggcccttgaccagccgacgcaggacggctttgtctatcgggttgacatgcgcctgcggccgtttggcgacagtgggccgctggtactcagctttgcggcactggaagattattaccaggagcagggtcgggactgggaacgctatgcgatggtgaaagcgcggatcatgggcgataacgacggcgtgtacgccagcgagttgcgcgcgatgctccgtcctttcgtcttccgccgttatatcgacttcagcgtgatccagtcgctgcgtaacatgaaaggcatgatcgcccgcgaagtgcggcgtcgcgggctgaaagacaacatcaagctcggcgccggcgggatccgtgaaattgagtttatcgttcaggtctttcagctgatccgcggtggtcgcgaacctgcactgcagcagcgcgccctgctgccgacgctggcggcgattgatgagctacatctgctgccggaaggcgacgcggcgctgctgcgcgaggcctatctgttcctgcgccggctggaaaacctgctgcaaagcatcaacgatgaacagacccagaccctgccgcaggatgaacttaaccgcgccaggctggcgtgggggatgcataccgaagactgggagacgctgagcgcgcagctggcgagccagatggccaacgtgcggcgagtgtttaatgaactgatcggcgatgatgaggatcagtccccggatgagcaactggccgagtactggcgcgagctgtggcaggatgcgctggaagaagatgacgccagcccggcgctggcgcatttaaacgataccgaccgccgtagcgtgctggcgctgattgccgattttcgtaaagagctggatcggcgcaccatcggcccgcgcggccgccaggtgctggatcagctgatgccgcatctgctgagcgaaatctgctcgcgtgccgatgcgccgctgcctctggcgcggatcacgccgctgttgaccgggatcgtcacccgtaccacctatcttgagctgctgagcgaattccccggcgcgctgaagcacctgatcacgctctgcgcggcgtcgccgatggtcgccagccagctggcgcgccacccgctgctgctggatgagctgctggatcccaacaccctctatcagccgacggcgaccgatgcctatcgcgacgagctgcgccagtacctgctgcgcgtgccggaagaggatgaagagcagcagctggaggcgttgcgccagtttaagcaggcgcagcagctgcatatcgcggcggcggatatcgctggtaccctgccggtgatgaaggtcagcgatcacttaacctggcttgccgaagcgatcctcgacgcggtggtgcagcaggcatgggggcagatggtcgctcgctacggtcagccgacccacctgcacgatcgccagggtcgcggcttcgccgttgtcggctacggtaagctcggcggctgggagctgggctacagctccgatctcgatctggtgttcctccatgactgcccggcggaggtgatgaccgacggcgagcgggagattgacggccgtcagttctacctgcggctggcccagcggatcatgcacctgttcagcacccgcacctcgtccggtattctctacgaagtggacgcccggctgcgtccttctggcgcggcggggatgctggtcaccaccgccgacgcgtttgctgactatcagcagaacgaagcctggacgtgggaacatcaggcgctggtgcgcgcccgcgtggtctatggcgacccggcgctgcaggcgcgctttgacgccattcgtcgcgatatcctgaccaccccgcgggaggggacgaccctgcagaccgaggttcgcgagatgcgcgagaagatgcgcgcccaccttggcaacaaacatcccgatcgttttgatatcaaagccgatgccggcgggatcaccgatattgaatttattactcagtatctggtcctacgctatgccagtgacaagccgaagctgacccgctggtctgacaacgtgcgtattcttgagctgctggcgcagaacgacatcatggacgaggaggaggcgcgcgccttaacgcatgcatacaccaccttgcgtgatgcgctccatcacctggccctgcaggagcagccgggacacgtggcgccagaggccttcagccgggagcgtcagcaggtcagcgccagctggcagaagtggctgatggcttaa

SEQ ID NO: 120 - DNA, 1287 bp, Klebsiella variicola
  gene (1)..(1287): amtB
atgaaaatggcaacaatgaaatcgggtctgggggcattagcccttcttccgggactggcaatggccgcgcccgcagtggcggacaaagccgataacgcgtttatgatgatttgcaccgcgctggttctgtttatgaccatcccggggatcgcgctgttttacggcggcctgatccgcggcaaaaacgtcctttccatgctgactcaggtgattgtgacctttggcctggtctgcgtactgtgggtgatttatggctataccctggccttcggcaccggcggcagcttcttcggtagctttgactgggtgatgctgaaaaatattgaactgaaagcgctgatgggcaccttctatcagtacatccacgtggccttccagggctcgttcgcctgtatcaccgtcgggctgatcgtgggggcgctggctgagcgtattcgtttctccgccgtgctgattttcgtggtggtgtggatgacgctctcttatgttccgattgcgcacatggtctggggcggcggtctgctggcgacccacggcgcgctggacttcgcgggcggcaccgttgtacacatcaacgccgcggttgccgggctggtgggtgcgtatatgatgggcaaacgtgtgggcttcggcaaagaagcgttcaaaccgcacaatctgccgatggtgttcaccggaaccgccatcctctacgtgggctggttcggcttcaacgccggctccgccagcgcagcgaacgaaattgccgcactggctttcgtcaacaccgtcgtcgccacagcggcagccatcctggcctggacctttggcgaatgggctctgcgcggcaaaccttcactgctgggcgcctgctccggggcgattgccggtctggttggcgtcacaccagcctgtgggtatatcggtgtcggtggggcgttgattgtgggtatcgcatctggtctggcgggcatctggggcgtaacggcgctgaaacgctggctgcgggttgatgacccttgcgacgtcttcggcgtccacggcgtctgcggcatcgtcggctgtatcctgaccggtatcttcgcggccacctctctgggcggcgtgggttatgcagaaggcgtcaccatgggccatcagctgctggtgcaactcgagagtatcgcgattaccatcgtctggtcgggcgttgtcgctttcattggctacaaagtggcggacatgaccgtggggctgcgcgtaccagaagagcaggagcgcgaaggactggacgtcaacagccatggcgaaaacgcctacaacgcctga

SEQ ID NO: 121 - DNA, 1435 bp, Achromobacter spiritinus
  gene (1)..(1435): 16S
  misc_feature (255)..(255): n is a, c, t, g, unknown or other
  misc_feature (454)..(454): n is a, c, t, g, unknown or other
ctgaagagtttgatcctggctcagattgaacgctagcgggatgccttacacatgcaagtcgaacggcagcacggacttcggtctggtggcgagtggcgaacgggtgagtaatgtatcggaacgtgcctagtagcgggggataactacgcgaaagcgtagctaataccgcatacgccctacgggggaaagcaggggatcgcaagaccttgcactattagagcggccgatatcggattagctagttggtggggtaanggctcaccaaggcgacgatccgtagctggtttgagaggacgaccagccacactgggactgagacacggcccagactcctacgggaggcagcagtggggaattttggacaatgggggaaaccctgatccagccatcccgcgtgtgcgatgaaggccttcgggttgtaaagcacttttggcaggaaagaaacgtcatgggntaataccccgtgaaactgacggtacctgcagaataagcaccggctaactacgtgccagcagccgcggtaatacgtagggtgcaagcgttaatcggaattactgggcgtaaagcgtgcgcaggcggttcggaaagaaagatgtgaaatcccagagcttaactttggaactgcatttttaactaccgggctagagtgtgtcagagggaggtggaattccgcgtgtagcagtgaaatgcgtagatatgcggaggaacaccgatggcgaaggcagcctcctgggataacactgacgctcatgcacgaaagcgtggggagcaaacaggattagataccctggtagtccacgccctaaacgatgtcaactagctgttggggccttcgggccttagtagcgcagctaacgcgtgaagttgaccgcctggggagtacggtcgcaagattaaaactcaaaggaattgacggggacccgcacaagcggtggatgatgtggattaattcgatgcaacgcgaaaaaccttacctacccttgacatgtctggaattctgaagagattcggaagtgctcgcaagagaaccggaacacaggtgctgcatggctgtcgtcagctcgtgtcgtgagatgttgggttaagtcccgcaacgagcgcaacccttgtcattagttgctacgaaagggcactctaatgagactgccggtgacaaaccggaggaaggtggggatgacgtcaagtcctcatggcccttatgggtagggcttcacacgtcatacaatggtcgggacagagggtcgccaacccgcgagggggagccaatcccagaaacccgatcgtagtccggatcgcagtctgcaactcgactgcgtgaagtcggaatcgctagtaatcgcggatcagcatgtcgcggtgaatacgttcccgggtcttgtacacaccgcccgtcacaccatgggagtgggttttaccagaagtagttagcctaacc

SEQ ID NO: 122 - DNA, 1528 bp, Achromobacter marplatensis
  gene (1)..(1528): 16S
  misc_feature (255)..(255): n is a, c, t, g, unknown or other
  misc_feature (999)..(999): n is a, c, t, g, unknown or other
  misc_feature (1009)..(1009): n is a, c, t, g, unknown or other
  misc_feature (1437)..(1437): n is a, c, t, g, unknown or other
ctgaagagtttgatcctggctcagattgaacgctagcgggatgccttacacatgcaagtcgaacggcagcacggacttcggtctggtggcgagtggcgaacgggtgagtaatgtatcggaacgtgcctagtagcgggggataactacgcgaaagcgtagctaataccgcatacgccctacgggggaaagcaggggatcgcaagaccttgcactattagagcggccgatatcggattagctagttggtggggtaanggctcaccaaggcgacgatccgtagctggtttgagaggacgaccagccacactgggactgagacacggcccagactcctacgggaggcagcagtggggaattttggacaatgggggaaaccctgatccagccatcccgcgtgtgcgatgaaggccttcgggttgtaaagcacttttggcaggaaagaaacgtcatgggttaataccccgtgaaactgacggtacctgcagaataagcaccggctaactacgtgccagcagccgcggtaatacgtagggtgcaagcgttaatcggaattactgggcgtaaagcgtgcgcaggcggttcggaaagaaagatgtgaaatcccagagcttaactttggaactgcatttttaactaccgggctagagtgtgtcagagggaggtggaattccgcgtgtagcagtgaaatgcgtagatatgcggaggaacaccgatggcgaaggcagcctcctgggataacactgacgctcatgcacgaaagcgtggggagcaaacaggattagataccctggtagtccacgccctaaacgatgtcaactagctgttggggccttcgggccttagtagcgcagctaacgcgtgaagttgaccgcctggggagtacggtcgcaagattaaaactcaaaggaattgacggggacccgcacaagcggtggatgatgtggattaattcgatgcaacgcgaaaaaccttacctacccttgacatgtctggaattcngaagagattnggaagtgctcgcaagagaaccggaacacaggtgctgcatggctgtcgtcagctcgtgtcgtgagatgttgggttaagtcccgcaacgagcgcaacccttgtcattagttgctacgaaagggcactctaatgagactgccggtgacaaaccggaggaaggtggggatgacgtcaagtcctcatggcccttatgggtagggcttcacacgtcatacaatggtcgggacagagggtcgccaacccgcgagggggagccaatcccagaaacccgatcgtagtccggatcgcagtctgcaactcgactgcgtgaagtcggaatcgctagtaatcgcggatcagcatgtcgcggtgaatacgttcccgggtcttgtacacaccgcccgtcacaccatgggagtgggttttaccagaagtagttagcctaaccgnaaggggggcgattaccacggtaggattcatgactggggtgaagtcgtaacaaggtagccgtatcggaaggtgcggctggatcacctccttt

SEQ ID NO: 123 - DNA, 1522 bp, Microbacterium murale
  gene (1)..(1522): 16S
tacggagagtttgatcctggctcaggatgaacgctggcggcgtgcttaacacatgcaagtcgaacggtgaacacggagcttgctctgtgggatcagtggcgaacgggtgagtaacacgtgagcaacctgcccctgactctgggataagcgctggaaacggcgtctaatactggatatgtgacgtggccgcatggtctgcgtctggaaagaatttcggttggggatgggctcgcggcctatcagcttgttggtgaggtaatggctcaccaaggcgtcgacgggtagccggcctgagagggtgaccggccacactgggactgagacacggcccagactcctacgggaggcagcagtggggaatattgcacaatgggcgcaagcctgatgcagcaacgccgcgtgagggatgacggccttcgggttgtaaacctcttttagcagggaagaagcgaaagtgacggtacctgcagaaaaagcgccggctaactacgtgccagcagccgcggtaatacgtagggcgcaagcgttatccggaattattgggcgtaaagagctcgtaggcggtttgtcgcgtctgctgtgaaatccggaggctcaacctccggcctgcagtgggtacgggcagactagagtgcggtaggggagattggaattcctggtgtagcggtggaatgcgcagatatcaggaggaacaccgatggcgaaggcagatctctgggccgtaactgacgctgaggagcgaaagggtggggagcaaacaggcttagataccctggtagtccaccccgtaaacgttgggaactagttgtggggtccattccacggattccgtgacgcagctaacgcattaagttccccgcctggggagtacggccgcaaggctaaaactcaaaggaattgacggggacccgcacaagcggcggagcatgcggattaattcgatgcaacgcgaagaaccttaccaaggcttgacatatacgagaacgggccagaaatggtcaactctttggacactcgtaaacaggtggtgcatggttgtcgtcagctcgtgtcgtgagatgttgggttaagtcccgcaacgagcgcaaccctcgttctatgttgccagcacgtaatggtgggaactcatgggatactgccggggtcaactcggaggaaggtggggatgacgtcaaatcatcatgccccttatgtcttgggcttcacgcatgctacaatggccggtacaaagggctgcaataccgcgaggtggagcgaatcccaaaaagccggtcccagttcggattgaggtctgcaactcgacctcatgaagtcggagtcgctagtaatcgcagatcagcaacgctgcggtgaatacgttcccgggtcttgtacacaccgcccgtcaagtcatgaaagtcggtaacacctgaagccggtggcctaacccttgtggagggagccgtcgaaggtgggatcggtaattaggactaagtcgtaacaaggtagccgtaccggaaggtgcggctggatcacctccttt

SEQ ID NO: 124 - DNA, 1537 bp, Kluyvera intermedia
  gene (1)..(1537): 16S
  misc_feature (455)..(455): n is a, c, t, g, unknown or other
  misc_feature (1004)..(1004): n is a, c, t, g, unknown or other
attgaagagtttgatcatggctcagattgaacgctggcggcaggcctaacacatgcaagtcgaacggtagcacagagagcttgctctcgggtgacgagtggcggacgggtgagtaatgtctgggaaactgcccgatggagggggataactactggaaacggtagctaataccgcataatgtcgcaagaccaaagagggggaccttcgggcctcttgccatcggatgtgcccagatgggattagcttgttggtgaggtaatggctcaccaaggcgacgatccctagctggtctgagaggatgaccagccacactggaactgagacacggtccagactcctacgggaggcagcagtggggaatattgcacaatgggcgcaagcctgatgcagccatgccgcgtgtgtgaagaaggccttcgggttgtaaagcactttcagcggggaggaaggcgatncggttaataaccgtgttgattgacgttacccgcagaagaagcaccggctaactccgtgccagcagccgcggtaatacggagggtgcaagcgttaatcggaattactgggcgtaaagcgcacgcaggcggtctgtcaagtcggatgtgaaatccccgggctcaacctgggaactgcattcgaaactggcaggcttgagtcttgtagaggggggtagaattccaggtgtagcggtgaaatgcgtagagatctggaggaataccggtggcgaaggcggccccctggacaaagactgacgctcaggtgcgaaagcgtggggagcaaacaggattagataccctggtagtccacgccgtaaacgatgtcgacttggaggttgtgcccttgaggcgtggcttccggagctaacgcgttaagtcgaccgcctggggagtacggccgcaaggttaaaactcaaatgaattgacgggggcccgcacaagcggtggagcatgtggtttaattcgatgcaacgcgaagaaccttacctggtcttgacatccacggaattnggcagagatgccttagtgccttcgggaaccgtgagacaggtgctgcatggctgtcgtcagctcgtgttgtgaaatgttgggttaagtcccgcaacgagcgcaacccttatcctttgttgccagcggtccggccgggaactcaaaggagactgccagtgataaactggaggaaggtggggatgacgtcaagtcatcatggcccttacgaccagggctacacacgtgctacaatggcatatacaaagagaagcgacctcgcgagagcaagcggacctcataaagtatgtcgtagtccggattggagtctgcaactcgactccatgaagtcggaatcgctagtaatcgtggatcagaatgccacggtgaatacgttcccgggccttgtacacaccgcccgtcacaccatgggagtgggttgcaaaagaagtaggtagcttaaccttcgggagggcgcttaccactttgtgattcatgactggggtgaagtcgtaacaaggtaaccgtaggggaacctgcggttggatcacctcctt

SEQ ID NO: 125 - DNA, 882 bp, Kluyvera intermedia
  gene (1)..(882): nifH
atgaccatgcgtcaatgcgccatttatggcaaaggtgggatcggcaaatccaccaccacgcaaaacctcgtcgccgctctcgcggaaatgggtaaaaaagtgatgatcgtcggctgcgacccgaaagcggactccacccgtctgatcctgcatgcgaaagcacagaacaccattatggagatggccgccgaagtgggttcagtggaagaccttgaactggaagatgtgctgcaaatcggttacggcggcgtgcgttgtgcagaatccggcggcccggagccaggcgtgggttgtgcaggccgcggcgttattaccgccattaacttccttgaagaagaaggcgcctatgtcagcgacctcgactttgtcttctatgacgtcctcggtgacgtggtctgcggcgggttcgccatgccgattcgtgaaaacaaagcgcaagagatctatatcgtctgctccggggaaatgatggcgatgtatgccgctaacaacatctccaaaggcatcgtgaaatacgctaaatccggcaaggtgcgcctgggcgggctgatttgtaactcccgtcagaccgaccgcgaagatgaactgatcatcgcgctggcagaaaaactgggcacccagatgattcactttgtgccacgcgacaacatcgtccagcgcgcggaaattcgccgtatgacggttatcgaatatgacccgaaatgcaaccaggccgacgaataccgcgcgctggcgaacaagatcgtcaacaacaccctgatggtcgtcccgaccccttgcaccatggatgaactggaagagctgctgatggaattcggcattatggatgtggaagacgccagcatcatcggtaaaaccgccgccgaagaaaacgcggcctga

SEQ ID NO: 126 - DNA, 660 bp, Kluyvera intermedia
  CDS (1)..(660): Dinitrogenase iron-molybdenum cofactor CDS
atgaacgataacgatgtccttttctggcgcatgctggcgctatttcagtgtctgccggaactgcaacccgcgcagatcctggcctggctgacaggagaacgcgacgacgccttaaccccggcgtacctcgataagcttaacgtccgcgaactggaagcgaccttcccgtctgaaacggcgatgatgtcgcccgcacgctggagccgcgttaacgcgtgccttcacggtacgctgcccgcacacctgcaggtaaaaagcaccactcgtcaggggcaattacgggtagccttttgttcacaggatggattgctgatcaatggtcattttggtcaggggcggctgttttttatctacgcctttgatgaacagggcggatggctacacgcgttacgccgtcttccctcggccccgcaaacccaggagccgaatgaagttcgcgcgcagctcctgagtgattgccacctgctgttttgtgaagccattggcggccctgcggcggcccggctgattcgtcacaatatccacccgatgaaagtgtcgccagggatgtccattgccgcccagtgtgatgccattaccgcactgctgagcggacgtctgccaccgtggctggcaaaacgtcttgagaaagccaacccgctggaagagcgggtgttttaa

SEQ ID NO: 127 - protein, 219 aa, Kluyvera intermedia
MNDNDVLFWRMLALFQCLPELQPAQILAWLTGERDDALTPAYLDKLNVRELEATFPSETAMMSPARWSRVNACLHGTLPAHLQVKSTTRQGQLRVAFCSQDGLLINGHFGQGRLFFIYAFDEQGGWLHALRRLPSAPQTQEPNEVRAQLLSDCHLLFCEAIGGPAAARLIRHNIHPMKVSPGMSIAAQCDAITALLSGRLPPWLAKRLEKANPLEERVF

SEQ ID NO: 128 - DNA, 1374 bp, Kluyvera intermedia
  gene (1)..(1374): nifD1
atgaagggaaatgacattctcgcgctgctggatgaacccgcctgcgaacacaatcacaaacagaaatccggctgtagcgcccctaaacccggtgccacggcgggcggttgcgcgttcgacggcgcgcaaatcaccctgttgccgctgtcggatgtggcgcacctggtccacggaccgattggctgcacgggaagctcctgggataaccggggcagtatgagctccggccccagtctcaaccggctcggctttaccaccgacctgaacgagcaggatgtcattatggggcgcggcgaacggcggcttttccacgcggtgcgtcatatcgtcaaccgttatcaccctgccgccgtgtttatctataacacctgcgttccggcgatggagggtgatgatattgacgccgtctgtcaggcggcggaaaccgccaccggcgtgccagtgattgccgttgatgccgccgggttctatggcagcaaaaaccttggcaaccgtctcgcgggtgaagtgatggttaacaaggtcattggacggcgcccgcccgccccctggccggacgatacccccttcgcgccggaacaccgccacgatatcggcctgattggcgaatttaatatcgccggggagttctggcacgttcagccgctgctcgatgagctgggtattcgcgtgctgggcagcctttccggggatggccgttttagtgaaatccagaccctgcaccacgcgcaggtcaatatgctggtctgctcaagagcgctgatcaatgttgcccgcaccctggaacagcgctatggcaccccctggtttgagggcagtttttacggcgtgcgcgctacctccgatgccctgcgtcaactggcatccctgcttggcgacagcgatctgattgcccgcaccgaagccgttattgcccgcgaagaagccacggcaaatcaggcgctcgccccgtggcgcgaacggctacagggtcgcaaagtgctgctctataccggtggggtgaaatcctggtcggtggtctccgcattgcaggatttagggatgaccgtcgtggcgactggcacccgcaaatctaccgaagaagataagcagcgtattcgcgaattaatgggcgatgacgcgctaatgctggaagaaggcaacgcccgcaccctgctggatgtggtgtaccgctatcaggcggatttgatgatcgctggggggcgtaacatgtataccgcgtacaaagcgcggctgccgtttctggatatcaaccaggagcgtgaacacgcctttgcgggttatcgcggcatcgtcaccctcgcccaacagctttgccagactattgaaagccccgtctggccgcaaacacacgcccgcgcgccgtggcaataa

SEQ ID NO: 129 - DNA, 1449 bp, Kluyvera intermedia
  gene (1)..(1449): nifD2
atgagcaatgcaacaggcgaacgtaatctggaaattatccaggaagtgctggagatctttcccgaaaaaacgcgcaaagaacgcagaaagcacatgatggtgaccgacccggagatggaaagcgtcgggaaatgcatcatctctaaccgcaaatcgcagccgggtgtgatgactgtccgcggctgctcctacgccgggtcgaaaggcgtggtttttgggccgattaaagatatggcccacatctcccacggcccgatcggctgtgggcagtactcccgtgccgggcggcgcaactactacaccggggtcagcggcgttgattccttcgggacgctgaactttacctctgattttcaggagcgcgatatcgtcttcggcggcgataaaaagctcaccaaactgattgaggagatggaggaactgttcccgctgaccaaaggcatctccattcagtcggagtgcccggtaggtttaatcggtgacgatatcgaagcggtggcgaatgccagtaaaaaagcgctcaacaagccggtgatcccggtgcgttgcgaaggctttcgcggcgtgtcgcagtcgctcggtcaccatatcgccaacgacgttatccgcgactgggtgctggataaccgcgaagggaagcccttcgaatctaccccctatgacgtggccatcatcggcgattacaacatcgggggggatgcctgggcgtcgcgcattctgcttgaagagatggggttacgcgtggtggcgcagtggtccggtgacggcacgctggtagagatggaaaacaccccgttcgtcaagctgaacctggtgcactgctaccgctctatgaactacatctctcgccatatggaagagaaacacggtatcccgtggatggagtacaacttcttcggcccgaccaaaatcgccgaatcgctgcgtaagatcgccgatcaatttgacgacaccatccgcgccaatgcggaagcggtgatcgccaaatatcaggcgcaaaacgatgcgattatcgccaaataccgcccgcgtctcgaaggccgcaaggtgctgctctatatgggtggcctgcgtcctcgccacgtgattggcgcgtatgaggatttgggcatggagattgtcgccgccgggtatgaatttgcccataacgacgattacgaccgcaccctgccggacctcaaagagggcacgctgttgttcgacgatgccagcagttatgaactggaagccttcgtgaaggcgattaagccggacctcattggctcaggcatcaaggaaaaatacattttccagaaaatgggggtaccgtttcgccagatgcactcctgggattactccggcccgtatcacggctatgacggctttgccatctttgcccgcgatatggacatgacgctcaacaatcccgcctggggcgagttgaccgcaccctggctgaaatcagcctga

SEQ ID NO: 130 - DNA, 1383 bp, Kluyvera intermedia
  gene (1)..(1383): nifK1
atggcagatatcatccgtaatcagaaaccgctggcggtaagcccggtaaaaagcggccagccgttaggcgccattctggcgagcctcggctttgagcacagtattccactggtgcacggtgcgcagggatgcagcgcgttcgccaaagtgttttttatccaacattttcatgaccctattccgctgcaatccacggcgatggaccccacctcaacggtcatgggggcggacggcaatatccttgccgcgctcaatacgctgtgccagcgcaacaccccgaaagctatcgtcctgttgagtaccggcctgtctgaggcgcagggcagcgatatcagccgcgtggtacgtcagtttcgtgaggattttccccgccacaaaaatatcgccctcctgacggtcaacaccccggatttttacggcacgctggagaacggctttagtgcggtggtggaaagcgtcatcgaacagtgggtgccggaaaagcctcagcatggcctgcgtaaccggcgggtcaacttgttgttaagtcacctgctgacgcccggtgatgttgagttgctgcgcagctacgtggaggcttttggcctgcaaccggtgatcgtgccggatctttcacagtcgctggatggtcacctggcaagcggtgatttttcgccggtcactcaggggggaacgcccctgcgcattatcgaacagatgggacagagcctgtgcacgtttgctattggcgtgtcgctgtcccgtgcggcatcgctgctggcacagcgtagccgtggcgaggtgatcgtgcttccccatctgatgaccatggaacattgcgaccgttttattcatcaactgaagatcatttccgggcgcgaggttcccgcctggattgagcgccagcgcggacaattgcaggatgcgatgatcgattgtcatatgtggttgcaggatacccggctcgcgctggccgccgagggcgatctgctggcgggctggtgtgatttcgcccgtagccagggcatgctccccggccccgttgtggcgccggtcagccagccgggcctgcaacagcttcccgtggagaaagtggtcattggcgatctggaagatatgcaggatttactctgcgctatgcctgctgacctgctggtcgccaactcccatgccgcagacctggccgaacaattctccatcccgctgatccgcgccgggttccctatcttcgacaggcttggcgaatttcgtcgcgtgcgtcagggataccccggcattcgcgacacgctgtttgagctggcgaacctgatgcgcgaacgtcatcaccacctgcccgtctaccgctcccccctgcgccagcaatttgcccaggacgctgacggaggccgctatgcaacatgttaa

SEQ ID NO: 131 - DNA, 1563 bp, Kluyvera intermedia
  gene (1)..(1563): nifK2
atgagccaaactgctgagaaaattgtcacctgtcatccgctgtttgaacaggacgaataccagacgctgtttcgcaataagcgcggtctggaagaggcgcacgacccgcagcgcgtgcaagaggtttttgaatggaccaccacggcggagtatgaagcgctgaactttaagcgtgaagcgttaaccgtcgatccggcaaaggcctgccagcctttaggatcggtactctgctcgctgggttttgccaatacgctgccttatgtgcacggttcccagggctgtgtggcctatttccgcacctattttaaccgtcatttcaaagagccgatcgcttgcgtttccgactctatgacagaggatgcggcggtcttcggcggcaacaacaaccttaacaccgggttgcaaaatgccagcgccctgtacaaaccggaaattgtcgctgtctccactacctgtatggcggaggtcatcggcgatgacctgcaggcctttatcgccaacgccaaaaaggacgggtttattgatgccgccattccggtgccctacgcccatacgccaagttttatcggtagccacatcaccggctgggacaacatgtttgaaggtttcgcccgggcatttaccgccgatcacgtggcgcaaccgggcaaactggcgaagctaaacctggtgaccggttttgaaacctatcttggcaattaccgcgtgctcaaacgcatgatggcccagatggaggtgccctgtagcctgctgtctgacccgtctgaggtgttagatacgccagccgacggccactatcgcatgtatgcgggcggcacaacgcaacaagagatgcgcgacgcccccgatgctatcgacaccctgctgctgcaaccctggcatctggtgaagagtaaaaaagtggtgcaggagtcctggggccagcccgccacagaagtgtccatcccaatgggactgaccgggaccgacgaactgctgatggcagtcagtcagttaaccggcaaaccggtggccgatgaactgacgctggagcgtgggcgcctggtggatatgattctcgattcacacacctggctgcacggtaagaaattcggtctctacggcgatccggattttgtgatggggctgacgcgtttcctgctggaactgggctgcgagccgacggttatcctctgtcataacggtagcaagcgctggcagaaagcgatgaagaaaatgcttgaggcatcgccctacggtcaggagagcgaagtgttcatcaactgcgatctgtggcatttccgctcgctgatgtttacccgcaaaccggactttatgatcggcaactcgtacgccaaattcatccagcgtgacacgctggcgaaaggcgaacagtttgaagttccgctgatccgtcttggcttcccgttgttcgaccgccaccacctgcatcgccagaccacatggggttatgaaggggcgatgaatatcgtcaccaccctggtcaacgccgtgctggaaaaagtcgaccgcgataccatcaaactgggcaaaacggactacagcttcgaccttgtccgctaa

SEQ ID NO: 132 - DNA, 1488 bp, Kluyvera intermedia
  gene (1)..(1488): nifL
atgacctttaatatgatgctggagaccagcgcaccgcagcacattgcgggcaacctctcacttcaacatcccggactgttttccacgatggttgaacaggctccgatcgcgatttcgctgaccgacccggacgcgaggattctgtacgctaatccggccttttgtcgccagaccggttatagcctggaagagctgctcaaccagaaccatcgcatactggcaagccaacagacgccgcgcagcatttatcaggaactgtggcaaacgctgctgcaacagatgccctggcgcggtcagctcatcaatcgccgtcgggatggcagcctttatctggctgaggtcgatatcaccccggtcgtcaacaaacagggcgaactggaacactacctcgccatgcaacgtgatatcagcgccagctatgcgctcgaacagcgattgcgcaatcacaccaccatgagcgaggcggtgctgaacaacattcctgccgccgtggtggtggtcaacgagcaggaccaggtagtcatggacaacctcgcctacaaaaccttctgtgccgactgcggtggcaaggagctgctcaccgaactggatttctcccggcgcaaaagcgatctctatgccgggcaaatactgcctgtggtgctgcgcggcgccgtgcgctggctctctgtcacctgctggaccttgccgggggtgagcgaagaagccagccgctactttattgataccgcgctgccccgcaccctggtggtgatcaccgactgcacccagcaacaacaacaggccgaacagggccgtctcgatcgtctcaaacaggagatgaccaccgggaagctgctggccgcgatccgtgaatcgttggatgccgcgctggttcagctaaactgccccatcaatatgctggcggcggcgcgacgtctcaacggtgaagataaccataacgtggcgctggatgccgcgtggcgcgagggggaagaggcgctggcccgcctgcaacgctgccgcccttctctcgatctggaagagagcgcgctgtggcctctgcaaccgctgtttgacgacctgcgcgccctttaccatacccgctataacaatggcgaaaatctgcacgttgaaatggcctctccgcatctggcggggtttggtcagcgcacgcagatccttgcctgtctcagtttgtggctcgaccgtacgctggccctcgccgccgcgctaccggacagaacgctgcatacccagctttacgcccgtgaagaagatggctggctgtccatttggctgacagataatgtgccgctcatccatgtgcgatacgcccactcccccgatgccctgaacgcccccggcaaagggatggagctgcgattgattcaaaccctggttgcccatcatcgcggcgcaatagaactaactacccgccctgaaggcggtacctgcctgaccctgcgattcccgttatttcattcactgaccggaggcccacgatga

SEQ ID NO: 133 - DNA, 1572 bp, Kluyvera intermedia
  gene (1)..(1572): nifA
atgacccagcgacccgagtcgggcaccaccgtctggcgttttgatctctcacagcaatttaccgccatgcagcgcatcagcgtggtgttgagtcgcgcaaccgagataagccagacgctgcaggaggtgctgtgtgttctgcataatgacgcatttatgcaacacggcatgctgtgtctgtatgacaaccagcaggaaattctgagtattgaagccttgcaggaggcagaccaacatctgatccccggcagctcgcaaattcgctatcgccctggcgaagggctggtaggagccgtactgtcccagggacaatctcttgtgctgccgcgtgtcgccgacgatcaacgctttctcgacaggcttggcatctatgattacaacctgccgtttatcgccgtccccttaatggggccaggcgcgcagacgattggcgtgctcgccgcgcagccgatggcgcgtctggaggagcggcttccttcctgtacgcgctttctggaaaccgtcgccaatctggtcgcacagacagtccggctgatgaccccgcctgccgccgccacaccgcgcgccgcgattgcccagaccgaacgccagcgcaactgtggcactcctcgccccttcggctttgagaatatggtgggcaaaagcccggccatgcagcagacaatggacattatccgccaggtttcgcgctgggataccacggtactggtgcgcggcgaaagcggcaccggtaaagaacttatcgccaatgctattcatcacaactcccctcgcgccgccgcgccctttgtgaaatttaactgcgcggcgctaccggatacgctactggagagcgaattgttcggccatgaaaaaggggcgttcaccggcgcggttcgccagcgtaaaggacgttttgaactggccgatggcggcacactgtttcttgatgaaattggcgaaagcagcgcctcgttccaggccaaactgctgcgtattttgcaggagggtgaaatggagcgcgttggcggcgacgaaaccctgcgcgtcaatgtgcgtatcatcgccgccaccaaccggaatctggaagaagaggtgcggatgggcaatttccgcgaggatctctattatcgcctcaacgtaatgcccatctccctgcccccgctgcgtgaacgtcaggaggacattgccgagctggcgcactttctggtgcgcaaaatcgcccataaccaggggcgtacgctgcgcatcagtgatggcgccatccgtctgctgatgggttacaactggcccggtaacgtgcgtgagctggaaaattgcctggaacgttcggcagtgatgtcagaaaacggcctgatcgaccgcgatgtggtgctctttaaccaccgtgagaacacgccaaaactcgctatcgccgccgcgccaaaagaggatagctggcttgatcaaacgctggatgaacgtcaacggctgattgccgcgctggaaaaagccgggtgggtgcaggccaaagcggcgcgtctgctgggtatgacgccccgtcaggtcgcctatcggatacaaattatggatatcagcatgcccaggatgtga

SEQ ID NO: 134 - DNA, 2853 bp, Kluyvera intermedia
  gene (1)..(2853): glnE
atgatgccgcactctccacagctacagcagcactggcaaactgtactggcccgcttgcctgagtcattcagtgaaacaccgcttagtgaacaagcgcagttagtgcttactttcagtgattttgtgcaggatagccttgccgcgcatcctgactggctggctgagctggaaagcgcaccgccacaggcggacgagtggaagcagtatgcgcaaacccttcgcgaatcgctggaaggtgtgggagatgaggcatcattaatgcgtgcgctgcgcctgttccgtcgccatatgatggtgcgcattgcctgggcgcagtcgctggcgctggtggcagaagatgagacgttgcagcagttgagcgtactggcggagaccctgatcgtcgctgcacgcgactggctttacgatgcctgctgtcgcgagtggggaacgccgtgcaatcagcagggggaaccgcagccgttgctgatcctgggcatgggcaagctgggtggcggggagcttaacttttcgtccgatatcgatctgatttttgcctggccggaaaacggttcaacgcgcggtgggcgacgcgaacttgataacgcccagttttttactcgcttgggacagcgcctgatcaaagtgctcgaccagccgacgcaggatggctttgtctatcgcgtggatatgcggctgcgcccgtttggcgacagcggtccgctggtgctgagttttgccgcgctggaagattattatcaggagcaggggcgcgactgggaacgttatgcgatggtgaaagcccgcattatgggcgataaggacgatgtttacgctggcgaattacgggccatgctgcggccgttcgtcttccgtcgctatatcgatttcagcgttattcagtctctgcgtaacatgaaagggatgattgcccgcgaagtgcgccgccgtggtctgaaagataacattaagctgggcgcgggcggcatccgtgagattgagtttatcgttcaggtgttccagttgatacgcggtgggcgcgagccgtcgttgcagtcccgttcactgttaccgacgctggacgctatcgataagctgggtttgctgccgcctggcgatgcaccggcgttacgccaggcctatttgtatctgcgccgtctggaaaacctgctgcaaagcattaacgacgaacaaacgcagacgctgccgacagatgaactcaatcgcgcgcgtctggcctgggggatgcgggtcgcagactgggaaaccctgaccgctgagcttgaaaagcagatgtctgccgtacgagggatattcaacaccctgattggcgatgacgaagccgaagagcagggggatgcgctctgcgggcaatggagtgagttgtggcaggatgcgtttcaggaagatgacagcacgcctgtgctggcgcacctttctgacgatgatcgccgccgcgtggtcgcgatgattgctgattttcgcaaagagctggataaacgcaccattggcccacgcggccgccaggtgctcgaccatctgatgccgcatctgttgagtgatgtctgctcccgtgaggatgcccctgtaccgttgtctcgcgtgacgccgctgttaacgggaattgtcacgcgtacgacgtatcttgagctgctcagcgagtttcctggtgcgcgtaagcatctgatttcactctgtgccgcctcgccgatggtggccagtaagctggcgcgctatccgttattgctggatgagttgctcgatccgaataccctttatcagcccacggcgatgaatgcctaccgggatgagctacgtcagtatctgctgcgtgtgccggatgacgatgaagagcagcaactggaggcgttacgccagtttaaacaggctcaattgttgcgtgtggcggcagcagatctggcaggcacactccccgtgatgaaagtgagcgatcacttaacatggcttgccgaagccatcattgaagccgtggtacaacaggcgtggagcctgatggtatcgcgttatgggcagccgaaacacttacgcgaccgtgaaggccgtgggtttgcagtggtcggttacggcaaactgggcggttgggagctgggctatagttccgatctggatttgattttccttcatgactgtccggtggacgtgatgactgacggcgagcgggaaatcgatggccgccaattttatctgcgccttgcccagcgcgtgatgcacctgttcagtacgcgcacctcatccgggatcctgtatgaggtagacgcgcgcttgcgcccgtccggtgcggcgggaatgctggtgacctcaaccgaatcctttgccgactaccagcgcaccgaagcctggacctgggaacatcaggcgctggttcgcgcccgcgttgtctatggcgatccacaattaaacgcgcaatttgatgccatccgccgcgatatcaccatgaccgtgcgtaatggtgcaacgttacaaaccgaggtgcgcgagatgcgcgaaaaaatgcgcgcccacttgagcaataagcacaaggatcgctttgatattaaagccgatgagggtggaattaccgatatcgaatttatcacccagtatctggtgctgcgttatgcccatgccaaaccgaaactgacgcgctggtcggacaatgtccgcattctggaagggctggcgcaaaacggcattatggaagagcaggaagcgcaggcacttaccaccgcctatacaacgttgcgtgatgagctgcatcacctggcgctacaggagctgccaggacatgttccggaggcatgttttgtcgctgaacgcgcgatggtgcgagcctgctggaacaagtggttggtggagccgtgcgaggacgcgtaa

SEQ ID NO: 135 - DNA, 1290 bp, Kluyvera intermedia
  gene (1)..(1290): amtB
atgaagaaagcactattaaaagcgggtctggcctcgctggcattactgccgtgtctggctatggcagccgatccggttgtcgtcgataaagccgacaatgcctttatgatgatttgcaccgcgctggtgctgtttatgtcaattccgggcatcgccctgttctatggtggtttaatccgcggtaaaaacgtcctttctatgctgacacaggttgcggttacgttcgcactggtgtgcgtgctgtgggtggtttacggctactctctggcctttggcactggcggcagcttcttcggtagcttcgactgggtgatgctgaaaaatattgagctgaaagcgctgatgggcaccatctatcagtacattcacgttgcgttccagggctcgtttgcctgtattaccgtcggcctgattgtcggtgcgctggcagaacgtatccgtttctccgcagtactgattttcgtcgtggtatggctgacgctgtcctacgtgccgatcgcacacatggtctggggcggcggtctgctggcaacccatggcgccatggattttgcgggcggtacagtcgttcacatcaacgcagccgttgcaggcctggtgggtgcttacctgattggcaaacgtgtcggtttcggtaaagaagcgtttaaaccgcacaacctgccgatggtgtttaccggtacggcaatcctctactttggctggttcggattcaacgcgggttctgcaagcgcggcgaacgaaattgcgggtctggcttttgttaacaccgtcgtggcaacagcgggtgcaatcctctcctgggtcttcggtgagtgggcgctgcgcggcaaaccgtctctgttgggtgcctgttctggtgcgattgctggcctcgtgggtatcaccccggcgtgtggttacgttggtgtgggtggcgcgctgatcgtgggcatcgttgcaggcctggcgggtctgtggggcgttaccgcgctgaaacgctggctgcgtgttgacgacccgtgtgatgtcttcggtgttcacggcgtgtgcggtatcgtaggttgtatcatgacaggtatcttcgcagccacttcactgggcggcgtgggttatgccgaaggcgtgaccatgggccatcaggttctggtacaactggaaagtatcgccattactatcgtatggtctggtatcgtcgcctttatcggttacaaactggctgatatgacagtgggtctgcgtgttccggaagatcaggaacgcgaagggctggacgtcaacagccacggcgagaacgcctacaacgcctga

SEQ ID NO: 136 - DNA, 498 bp, Kluyvera intermedia
  gene (1)..(498): PinfC
ctggggtcactggagcgctttatcggcatcctgaccgaagaatttgccggtttcttcccgacctggctggcccctgttcaggttgtggtgatgaatatcactgattctcaagctgaatatgtcaacgaattgacccgtaaattgcaaaatgcgggcattcgtgtaaaagcggacttgagaaacgagaagattggctttaaaatccgcgagcacactttacgtcgtgtcccttatatgttggtctgtggtgataaagaggtggaagcaggcaaagtggccgttcgcacccgccgcggtaaagacctgggcagcctggacgtaagtgaagtgattgagaagctgcaacaagagattcgcagccgcagtcttcaacaactggaggaataaggtattaaaggcggaaaacgagttcaaacggcacgtccgaatcgtatcaatggcgagattcgcgcccaggaagttcgcttaactggtctggaaggtgagcagctgggtatt

SEQ ID NO: 137 - DNA, 1537 bp, Kosakonia pseudosacchari
  gene (1)..(1537): 16S
  misc_feature (454)..(454): n is a, c, t, g, unknown or other
attgaagagtttgatcatggctcagattgaacgctggcggcaggcctaacacatgcaagtcgaacggtagcacagagagcttgctctcgggtgacgagtggcggacgggtgagtaatgtctgggaaactgcctgatggagggggataactactggaaacggtagctaataccgcataacgtcgcaagaccaaagagggggaccttcgggcctcttgccatcagatgtgcccagatgggattagctagtaggtggggtaacggctcacctaggcgacgatccctagctggtctgagaggatgaccagccacactggaactgagacacggtccagactcctacgggaggcagcagtggggaatattgcacaatgggcgcaagcctgatgcagccatgccgcgtgtatgaagaaggccttcgggttgtaaagtactttcagcggggaggaaggcganacggttaataaccgtgttgattgacgttacccgcagaagaagcaccggctaactccgtgccagcagccgcggtaatacggagggtgcaagcgttaatcggaattactgggcgtaaagcgcacgcaggcggtctgtcaagtcggatgtgaaatccccgggctcaacctgggaactgcatccgaaactggcaggcttgagtctcgtagagggaggtagaattccaggtgtagcggtgaaatgcgtagagatctggaggaataccggtggcgaaggcggcctcctggacgaagactgacgctcaggtgcgaaagcgtggggagcaaacaggattagataccctggtagtccacgccgtaaacgatgtctatttggaggttgtgcccttgaggcgtggcttccggagctaacgcgttaaatagaccgcctggggagtacggccgcaaggttaaaactcaaatgaattgacgggggcccgcacaagcggtggagcatgtggtttaattcgatgcaacgcgaagaaccttacctggtcttgacatccacagaacttgccagagatggcttggtgccttcgggaactgtgagacaggtgctgcatggctgtcgtcagctcgtgttgtgaaatgttgggttaagtcccgcaacgagcgcaacccttatcctttgttgccagcggtccggccgggaactcaaaggagactgccagtgataaactggaggaaggtggggatgacgtcaagtcatcatggcccttacgaccagggctacacacgtgctacaatggcgcatacaaagagaagcgacctcgcgagagcaagcggacctcataaagtgcgtcgtagtccggattggagtctgcaactcgactccatgaagtcggaatcgctagtaatcgtggatcagaatgccacggtgaatacgttcccgggccttgtacacaccgcccgtcacaccatgggagtgggttgcaaaagaagtaggtagcttaaccttcgggagggcgcttaccactttgtgattcatgactggggtgaagtcgtaacaaggtaaccgtaggggaacctgcggttggatcacctcctt

SEQ ID NO: 138 - DNA, 882 bp, Kosakonia pseudosacchari
  gene (1)..(882): nifH
atgaccatgcgtcaatgcgccatttacggcaaaggtgggatcggtaaatcgaccaccacacagaacctggtcgccgcgctggcggagatgggtaagaaagtcatgatcgtcggctgcgatccgaaagccgactccacgcgtttgatcctgcatgcgaaagcgcagaacaccattatggagatggccgccgaagtcggctccgtcgaagacctggaattagaagacgtgctgcaaatcggttacggcggcgtgcgctgcgcggaatccggtggcccggagccaggtgtgggttgtgccggtcgtggcgtgatcaccgcgattaacttcctcgaagaagaaggcgcttacgtgccggatctggattttgttttctacgacgtgctgggcgacgtggtatgcggtggtttcgccatgccgattcgtgaaaacaaagcgcaggagatctacatcgtttgctctggcgaaatgatggcgatgtacgccgccaataacatctccaaaggcatcgtgaaatatgccaaatccggtaaagtgcgcctcggcgggctgatttgtaactcgcgccagaccgaccgcgaagatgaactcatcattgcgctggcggaaaaactcggcacgcaaatgatccactttgttccccgcgacaacattgtgcagcgtgcggaaatccgccgtatgacggttatcgaatatgacccgacctgcaatcaggccaacgaatatcgcagccttgccagcaaaatcgtcaacaacaccaaaatggtggtaccaaccccctgcaccatggatgaactggaagaactgctgatggagttcggcattatggatgtggaagacgccagcatcattggtaaaaccgccgccgaagaaaacgccgtctga

SEQ ID NO: 139 - DNA, 1449 bp, Kosakonia pseudosacchari
  gene (1)..(1449): nifD1
atgagcaatgcaacaggcgaacgtaacctggaaatcatcgagcaggtgctggaggttttcccggaaaagacgcgcaaagagcgcagaaaacacatgatggtgacggacccggagcaggagagcgtcggcaagtgcatcatctctaaccgcaaatcgcagccgggcgtgatgaccgtgcgtggctgctcgtatgccggatcaaaaggggtggtatttgggccaatcaaagatatggcgcatatctcccacggcccgatcggctgcgggcagtactcccgcgccgggcggcgtaactactataccggcgtcagcggcgtggacagtttcggcacgctcaacttcacctccgatttccaggagcgcgacatcgtgtttggcggcgacaaaaagctcgccaaactgattgaagagctggaagaactgtttccgctgaccaaaggcatttcgattcagtcggaatgcccggtcggcctgattggcgatgatattgaagccgtggcgaacgccagccgcaaagcgatcaacaaaccggttattccggtgcgttgcgaaggctttcgcggcgtgtcgcaatccctcggtcaccatattgccaacgatgtgatccgcgactgggtactggataaccgcgaaggcaaaccgtttgaatccaccccttacgatgtggcgatcatcggcgattacaacatcggtggcgacgcctgggcctcgcgcattttgctcgaagagatggggttgcgggtggtcgcgcagtggtccggcgacggtacgctggtggagatggaaaacacgccgttcgtcaaactgaacctggtgcactgctaccgctcgatgaactacatctcgcgccatatggaggagaagcacggtattccgtggatggaatacaacttctttggcccgacgaaaatcgcggaatcgctgcgcaaaatcgccgacctgttcgacgacaccattcgcgccaacgccgaagcggtgatcgcccgataccaggcgcagaacgacgccattatcgccaaatatcgcccacgtctggagggtcgcaaagtgttgctctatatgggcgggctgcgtccgcgccatgtgattggcgcctatgaagatctgggaatggagatcatcgccgccggttatgagtttggtcataacgacgattacgaccgcaccctgccggatctgaaagagggcacgctgctgtttgatgacgccagcagctatgagctggaggcgtttgtcaacgcgctgaaaccggatctcatcggttccggcatcaaagagaagtacatctttcagaaaatgggcgtgccgtttcgccagatgcactcctgggattactccggcccgtaccacggctatgacggcttcgccatcttcgcccgcgatatggatatgacgctcaacaaccccgcctggggtcagttgaccgcgccgtggcttaaatccgcctga

SEQ ID NO: 140 - DNA, 1374 bp, Kosakonia pseudosacchari
  gene (1)..(1374): nifD2
atgaaggggaacgacatcctggctctgctcgatgaaccagcctgcgagcataaccataaacagaaaaccggctgtagcgcgccaaaacccggcgccaccgccggaggctgcgccttcgacggcgcacagatcaccctgctgccactttccgatgtggcgcatctggtacatggcccgattggctgcgccggcagctcatgggataaccgtggcagcctgagttctggcccgctgattaaccgactcggattcaccactgatttgaacgaacaggatgtcatcatggggcgcggcgagcggcggttgtttcacgcggtgcgccatattgtcgagcgctatcacccggcggcggtatttatttacaacacctgcgttccggctatggaaggcgatgacattgacgcggtctgccaggccgccgcgaccgccaccggtgtgcccgtgattgccgtagatgtggccggtttttacggtagcaaaaacctgggtaaccgcctcgcgggcgaggtgatggtgaaaaaagttatcggcgggcgcgaacccgcgccgtggccggacaatacaccttttgccccggcgcaccgccatgacataggcctgattggcgaatttaacatcgccggcgagttctggcatatccagccgctgcttgatgagctgggtattcgcgtccttggctccctttccggcgacgggcgctttgccgagatccagacgttgcaccgcgcgcaggtcaatatgctggtgtgctccagggcgctgattaatgtcgccagatcgcttgaacaacgttatggcacaccctggtttgaaggcagtttttatggcgttcgcgccacctccgatgccctgcgccagctggcaacactcaccggcgatagcgatttaatggcgcgaaccgaacggctgatcgcacgtgaagagcaagccacagaacaggcgctagcaccgctgcgtgaacggttacacggccggaaagtgctgctctataccggtggcgtgaaatcctggtcggtggtttcggcgctgcaggatctcggcatgacggtcgttgctaccggaacgcgcaaatccaccgaagaggataaacaacgcatccgtgaactgatgggcgatgacgccatcatgctggatgaaggcaatgcccgcgccttgctggatgtggtctatcgctacaaagccgacatgatgatcgcgggcgggcgcaacatgtacaccgcctataaagcgcgtctgccctttctggatatcaaccaggagcgtgaacacgcgtttgccggttatcgcggcatcatcacgcttgccgaacaactttgtcagacgctggaaagcccggtctggccgcaaacacatgcccgcgccccgtggcaataa

SEQ ID NO: 141 - DNA, 1563 bp, Kosakonia pseudosacchari
  gene (1)..(1563): nifK1
atgagccagactgctgagaaaatacagaattgccatcccctgtttgaacaggacgcctaccagacactatttgccggtaaacgggcactcgaagaggctcactcgccggagcgggtgcaggaagtgtttcaatggaccaccaccccggaatacgaagcgctgaacttcaaacgcgaagcgctgactatcgacccggcaaaagcctgccagccgctgggggcggtgctctgttcgctggggtttgccaacaccctgccgtatgtgcacggttcacagggttgtgtggcctatttccgtacgtactttaaccgccacttcaaagaaccggtggcctgcgtgtcggattcgatgacggaagacgcggccgtgttcggcgggaataacaacctcaacaccgggttacaaaacgccagcgcactgtataaaccggagattatcgccgtctctaccacctgtatggcggaagtgatcggtgatgatttacaggcgtttatcgccaacgccaaaaaagatggttttctcgatgccgccatccccgtgccctacgcccacacccccagttttatcggtagccatatcaccggctgggacaacatgtttgaaggttttgcccgtacctttaccgcaaaccatcagccacagcccggtaaactttcacgcctgaacctggtgaccgggtttgaaacctatctcggcaatttccgcgtgctgaaacgcatgatggaacaaatggaggtgcaggcgagtgtgctctccgatccgtcggaggtgctggacacccccgccaatggccattaccagatgtacgcgggcggtacgacgcagcaagagatgcgcgaggcaccggatgccatcgacaccctgctgctgcaaccgtggcagctggtgaaaagcaaaaaagtggtgcaggagatgtggaatcagcccgccaccgaggttgccattcccgtcgggctggcaggcacagacgaactgttgatggcgattagccagttaaccggcaaagccattcccgattcgctggcgctggagcgcgggcggctggtcgatatgatgctcgactcccacacctggttacacggtaaaaaattcggtctgtttggcgatccggattttgtcatgggattgacccgcttcctgctggaactgggctgtgaacctgccgtcatcctctgccataacggtaacaaacgctggcaaaaagcgatgaagaaaatgctcgatgcttcaccgtacggccaggagagcgaagtgtttatcaactgcgacttgtggcatttccgctcgctgatgttcacccgccagccggattttatgattggcaactcgtacgccaagtttattcagcgcgacaccttagccaagggcgaacagtttgaagtcccgctgatccgcctcggttttccgctgttcgaccgtcaccatctgcaccgccagaccacctggggctacgagggcgcgatgagcattctcacgacgctggtgaatgcggtactggagaaagtggacaaagagaccatcaagctcggcaaaaccgactacagcttcgatcttatccgttaa

SEQ ID NO: 142 - DNA, 1386 bp, Kosakonia pseudosacchari
  gene (1)..(1386): nifK2
atggctgatattgttcgtagtaaaaaaccgctggcggtgagcccgataaaaagcggccagccgctgggggcgatcctggcaagcctgggtttcgaacagtgcataccgctggtacacggcgctcaggggtgcagcgcgttcgcgaaagtgttctttattcaacattttcacgacccgatcccgctgcaatcgacggcgatggacccgacttccaccattatgggcgccgatgaaaacatttttaccgcgctcaatgttctctgccagcgcaacgccgcgaaagccatcgtgctgctcagcaccgggctgtcagaagcccagggcagcgatatttcacgagtggtgcgccagtttcgtgatgactttccgcggcataaaaacgtggcgctgctcaccgtcaacaccccggatttctacggctcgctggaaaacggctacagcgccgtgctggaaagcatgattgaacagtgggtgcccgcgcagcccgccgccagcctgcgcaaccgtcgcgtcaacctgctggtcagccatttactgacgccgggcgatatcgaactgttacgcagttatgtggaagcattcggtctgcaaccggtgattgtgccggatctatcgcagtcgctggacggacatctggccaacggtgatttttcgcccgtcacccaggggggaacaccgctgcgcatgattgaacagatggggcaaaacctggccacttttgtgattggccactcgctggggcgggcggcggcgttactggcgcagcgcagccgtggcgaggtgatcgccctgccgcatctgatgacgcttgatgcgtgcgacacctttatccatcgcctgaaaaccctctccgggcgcgacgtgcccgcgtggattgagcgccagcgcgggcaagtgcaggatgcgatgatcgattgccatatgtggttgcagggcgcggctatcgccatggccgcagaaggcgatcacctggcggcatggtgcgatttcgcccgcagccagggcatgatccccggcccggttgtcgcgccggtcagccagccggggttgcaaaatctgccggttgaaatggtggtcatcggcgatctggaagatatgcaggatcggctttgcgcgacgcccgccgcgttactggtggccaattctcatgccgccgatctcgccacgcagtttgatatgtcgcttatccgcgccgggtttccggtgtatgaccggctgggggaatttcgtcggctgcgccaggggtatagcggcattcgtgacacgctgtttgagctggcgaatgtgatgcgcgaacgccattgcccgcttgcaacctaccgctcgccgctgcgtcagcgcttcggcgacaacgttacgccaggagatcggtatgccgcatgttaa

SEQ ID NO: 143 - DNA, 1488 bp, Kosakonia pseudosacchari
  gene (1)..(1488): nifL
atgaccctgaatatgatgatggatgccagcgcgcccgaggccatcgccggtgcgctttcgcaacaacatcctgggctgttttttaccatcgttgaagaagcccccgtcgctatttcactaaccgatgccgaggcacgtattgtctatgccaacccggcattctgccgccagaccggctatgagcttgaggagttgttgcagcaaaatccccgcctgcttgccagtcagcagaccccacgggaaatctaccaggatatgtggcacaccctgttacaacgtcgaccatggcgcgggcaattgatcaaccgccaccgtgacggcagcctttttctggttgagatcgatatcaccccggtgattaacccgtttggcgaactggaacactacctggccatgcagcgcgatatcagcgccggttatgcgctggagcagcggttgcgtaatcacatggcgctgaccgaagcggtgctgaataacattccggcggcggtggtcgtggtcgatgaacgcgatcgtgtggttatggataacctcgcctataaaactttctgtgctgattgcggcggaaaagagctactgagcgaactccatttttcagcccgtaaagcggagctggcaaacggccaggtcttaccggtggtgctgcgcggcgcggtgcgctggttgtcggtcacctgctgggcgctgccaggcgtcagcgaagaagccagtcgctactttattgataataccttgacgcgcacgctggtggtcatcaccgacgacacccagcagcgccagcagcaagagcaaggacggcttgaccgccttaaacagcagatgaccagcggcaaactgctggcggcgatccgcgaagcgcttgacgccgcgctgatccagcttaactgccccatcaatatgctggcggcggcgcggcgtttaaacggcagtgataacagcaacgtagcgctggacgccgcgtggcgcgaaggtgaagaagcgatggcgcggctgaaacggtgccgcccgtcgctggagctggaaagtgccgccgtctggccgctgcaacccttttttgacgacttgcgcgcgctttatcacacccgctacgagcagggtaaaaatttgcaggtcacgctggattcgacgcatctggtgggatttggtcagcgaacccaactgctggcctgcctgagtctgtggctcgatcgcacgctggatattgccgtcgggctgcgtgatttcaccgcccaaacgcagatttacgcccgggaagaagcgggctggctctcgttgtatatcactgacaatgtgccgttgattccgctgcgccatacccattcgccggatgcgcttaacgcaccgggaaaaggtatggagttgcggctgatccagacgctggtagcgcatcacaacggcgcgatagaactcacttcacgccccgaagggggaagctgcctgaccctacgattcccgctatttcattcactgaccggaggttcaaaatga

SEQ ID NO: 144 - DNA, 1575 bp, Kosakonia pseudosacchari
  gene (1)..(1575): nifA
atgacccagcgaaccgagtcgggtaataccgtctggcgcttcgatttatcccagcagttcaccgcgatgcagcggataagcgtggttctcagccgggcgaccgaggttgaacagacactccagcaggtgctgtgcgtattgcacaatgacgcctttttgcagcacggcatgatctgtctgtacgacagccagcaggcgattttgactattgaagcgttgcaggaagccgatcagcagttgatccccggcagctcgcaaattcgctaccgtccgggtgaagggctggtcgggacggtgctttcgcaggggcaatcgttagtgctggcgcgtgtggctgacgatcagcgctttcttgaccgcctgggactgtatgattacaacctgccgtttatcgccgtgccgctgatagggccggatgcgcagacttttggcgtgctgacggcgcaaccgatggcgcgttacgaagagcggttacccgcctgcacccgctttctggaaacggtcgcgaatctggtggcgcagaccgtgcgtttgatgacgccgccggctgcacgcccttccccacgcgctgccatcacgccaaccgccagcccgaaatcgtgcagtacttcacgcgcgttcggcttcgaaaatatggtcggcaacagcccggcaatgcgccagaccatggagattatccgtcaggtttcgcgctgggataccaccgttctggtgcgcggcgagagcggcaccggcaaggaactgattgccaacgccatccatcacaattcgccgcgcgccagtgcgccatttgtgaaattcaactgtgcggcgctgccggacacattgcttgaaagcgaattatttggtcatgaaaaaggcgcctttaccggcgcggtacgccagcgtaaaggccgttttgagctggccgatggcggcacgctgtttcttgacgaaattggggaaagcagcgcctcgtttcaggctaagctgctgcgtattttgcaggagggcgaaatggaacgcgtcggtggtgacgagacattgcaagtgaatgtgcgcatcattgccgcgacgaaccgcaaccttgaagatgaagtacgcctgggacattttcgcgaagatctctattaccgcctgaatgtgatgcccatcgccctgccgccgctgcgcgaacgccaggacgacatcgccgaactggcacattttctggtgcgtaaaatcgcccacaaccagaaccgcacgctgcgcattagcgagggcgctatccgcctgctgatgagctacagctggcccggcaatgtgcgcgaactggaaaactgccttgagcgctctgcggtgatgtcggaaaacggtctgatcgatcgggacgtgattttatttaatcatcgcgaccagccagccaaaccgccggttatcagcgtcacgcccgacgataactggctcgataacacccttgacgagcgccagcggctgattgccgcgctggaaaaagcgggatgggtacaagccaaagccgcccgcttgctggggatgacgccgcgccaggtcgcttatcgtattcagaccatggatatcaccctgccaaggctataa

SEQ ID NO: 145 - DNA, 2850 bp, Kosakonia pseudosacchari
  gene (1)..(2850): glnE
atgccgcaccacgcaggattgtcgcagcactggcaaacggttttttctcgtctgccggaagcgctcaccgcgcaaccattgagcgcgcaggcgcagtcagtgctcacttttagtgattttgttcaggacagcatcatcgtgcatcctgagtggctggcagagcttgaaagcgcaccgccgccagcgaacgagtggcaacactacgcgcaatggctgcaagcggcgctggagggcgtcaccgatgaaacctcgctgatgcgcacgctgcggctgtttcgccgtcgcattatggtgcgcatcgcctggagtcaggcgctacagttggtggcggaagaggatatcctgcaacagctcagcgtgctggcggaaactctgatcgtcgccgcgcgcgactggctctatgacgcctgctgccgtgagtggggaacgccgtgcaatccgcaaggcgtcgcgcagccgatgctggtgctcggcatgggcaaacttggcggcggcgaactcaatttctcatccgatatcgatttgatttttgcctggccggaaaatggcaccacgcgcggcggacgccgtgaactggataacgcgcagttttttacccgccttggtcaacggctaattaaagtcctcgaccagcccacgcaggatggctttgtctaccgcgtcgatatgcgcttgcgtccctttggcgacagcggcccgctggtgctgagttttgccgcgctggaagattactaccaggagcaggggcgcgactgggaacgatacgcgatggtgaaagcgcgcattatgggggacaacgacggcgaccatgcgcgagagttgcgcgccatgctgcgcccgttcgttttccgccgctatatcgacttcagcgtgatccagtctctgcgcaacatgaaaggcatgattgcccgcgaagtgcggcgtcgcggcctgaaggacaacataaaactcggcgcgggcggtattcgcgaaatagagtttatcgtgcaggttttccagttgattcgcggcggtcgcgagcctgcgctgcaatcgcgttcgctgttgccgacgcttgctgccattgatcaactacatctgctgccggatggtgatgcaccccggctgcgcgaggcgtatttgtggctgcgacggctggaaaacttgctgcaaagcattaatgacgaacagacacagacgctgccggccgatgatttgaatcgcgcgcgcctcgcctggggaatgggcaaagagagctgggaagcgctctgcgaaacgctggaagcgcatatgtcggcggtgcggcagattttcaacgatctgattggcgatgatgaaacggattcgccggaagatgcgctttctgagggctggcgcgaattgtggcaggatgcgttgcaggaagaggactctacgcccgtgctggcgcatctttccgaggacgatcgccgccgcgtggtggcgctgattgctgattttcgcaaagagctggataaacgcaccattggcccgcgcgggcgacaggtactcgatcacttaatgccgcatctgctcagcgatgtatgctcgcgtgacgatgcgccagtgccgctgtcgcgtctgacgccgctgctcaccggtattattacgcgcaccacttaccttgagctgctgagtgaattccccggtgcgctgaaacacctcatttccctgtgcgccgcgtcgccgatggtggccagccaactggcgcgctacccgatcctgctcgatgaactgctcgacccgaacacgctctatcaaccgacggcgatgaacgcctatcgcgatgaactgcgacaatacctgttgcgcgtgccggaagaggatgaagagcagcaactggaggcgctacggcagtttaagcaggcgcagttgttgcgcgtagcggcggcggatatcgccggtacgttacccgtcatgaaagtgagcgatcacttaacctggctggcggaagcgattatcgatgcggtggtgcagcaagcctggaaccagatggtggcgcgttacggccagccgacgcatctgcacgatcgcgaagggcgcggtttcgccgtggtcggttacggcaaacttggcggctgggaattaggttacagctccgatctggatctggtgttcctgcacgactgccccatggatgtgatgaccgatggcgagcgtgaaatcgatggccgccagttctatttgcgcctcgcgcagcgcgtgatgcacctgttcagcacgcgcacgtcgtccggcattctttatgaagtcgatgcgcgtttgcgcccgtccggcgcggccggaatgctggtgaccactgcggaagcgttcgccgattatcaaaaaaatgaagcctggacatgggagcatcaggcgctggcgcgtgcgcgcgtggtgtacggcgatccgcaactgaccgccgaatttgacgccattcgccgcgatatcctgatgacctcccgcgatgccgctaccctgcaaaccgaagtgcgggaaatgcgtgagaaaatgcgcgcccatcttggtaacaagcacaaagaccgtttcgatctgaaagccgatgaaggcggtatcaccgatattgagtttatcgctcagtatctggtgctgcgctttgcccatgagaagccgaaactgacgcgctggtcggataatgtgcgcatcctcgaagggctggcgcaaaacggcatcatggatgagcaggaagcgcaggcattgacgctggcgtacaccacgttgcgtgatgagctgcaccacctggcgctgcaagagctgccaggacatgtggcgctctcctgttttgtcgccgagcgtgcgcttatcaaaaccagctgggacaagtggctggtggaaccgtgcgccccggcgtaa

SEQ ID NO: 146 - DNA, 1287 bp, Kosakonia pseudosacchari
  gene (1)..(1287): amtB
atgaaaaacacaacattaaaaacggctcttgcttcgctggcgttgctgccaggcctggcgatggcggctcccgctgtggcggataaagccgacaacggctttatgatgatttgcaccgcgctggtgctgtttatgaccattccgggcattgcgctgttctacggcggtttgatccgcggtaaaaacgtgctgtcgatgctgacgcaggttgccgtcaccttcgctctggtgtgcatcctgtgggtggtttacggctactctctggcatttggcgagggcaacagcttcttcggcagtttcaactgggcgatgttgaaaaacatcgaattgaaagccgtgatgggcagcatttatcagtacatccacgtggcgttccagggctcctttgcttgtatcaccgttggcctgattgtcggtgcgctggctgagcgtattcgcttctctgcggtgctgatttttgtggtggtatggctgacgctttcttatgtgccgattgcgcacatggtctggggtggcggtctgctggcaacccacggcgcgctggatttcgcgggcggtacggttgttcacatcaacgccgcgatcgcaggtctggtgggggcttacctgattggcaaacgcgtgggctttggcaaagaagcgttcaaaccgcataacctgccgatggtcttcaccggcaccgcgatcctctatgttggctggtttggcttcaacgccggctctgcaagctcggcgaacgaaatcgctgcgctggctttcgtgaacacggttgttgccactgcggccgctattctggcgtgggtatttggcgagtgggcaatgcgcggtaagccgtctctgctcggtgcctgttctggtgccatcgcgggtctggttggtatcaccccggcgtgcggttatgtgggtgtcggcggcgcgctgattgtgggtctgattgccggtctggcagggctgtggggcgttactgcactgaaacgtatgttgcgtgttgatgacccatgcgatgtcttcggtgtgcacggcgtgtgcggcatcgtgggttgtatcctgaccggtatcttcgcgtctacgtcgctgggcggtgtcggtttcgctgaaggggtgaccatgggccatcaggtactggtacagctggaaagcgttgccatcactatcgtgtggtctggcgtggtggcctttatcggttacaaactggcggatatgacggtaggcctgcgcgtaccggaagagcaagagcgtgaagggctggatgtgaacagccacggcgaaaatgcgtataacgcctga

SEQ ID NO: 147 - DNA, 500 bp, Kosakonia pseudosacchari
  gene (1)..(500): PinfC
ttcttggttctctggagcgctttatcggcatcctgactgaagaatttgcaggcttcttcccaacctggcttgcacccgtgcaggtagttgtgatgaacatcactgattcgcaggctgaatacgttaacgaattgacccgtaaactgcaaaatgcgggcattcgtgtaaaagcagacttgagaaacgagaagattggctttaaaatccgcgagcacactttacgtcgtgtcccttatatgctggtttgtggtgacaaagaggtcgaagccggcaaagttgctgtgcgtacccgtcgcggtaaagacctgggtagcctggacgtaaatgatgttatcgagaagctgcaacaagagattcgcagccgcagtcttcaacaactggaggaataaggtattaaaggcggaaaacgagttcaaacggcgcgtcccaatcgtattaatggcgagattcgcgccacggaagttcgcttaacaggtctggaaggcgagcagcttggtatt

SEQ ID NO: 148 - DNA, 348 bp, Kosakonia pseudosacchari
  gene (1)..(348): Prm1
cgttctgtaataataaccggacaattcggactgattaaaaaagcgccctcgcggcgctttttttatattctcgactccatttaaaataaaaaatccaatcggatttcactatttaaactggccattatctaagatgaatccgatggaagctcgctgttttaacacgcgttttttaaccttttattgaaagtcggtgcttctttgagcgaacgatcaaatttaagtggattcccatcaaaaaaatattctcaacctaaaaaagtttgtgtaatacttgtaacgctacatggagattaactcaatctagagggtattaataatgaatcgtactaaactggtactgggcgc

SEQ ID NO: 149 - DNA, 339 bp, Kosakonia pseudosacchari
  gene (1)..(339): Prm7
cgcgtcaggttgaacgtaaaaaagtcggtctgcgcaaagcacgtcgtcgtccgcagttctccaaacgttaattggtttctgcttcggcagaacgattggcgaaaaaacccggtgcgaaccgggtttttttatggataaagatcgtgttatccacagcaatccattgattatctcttctttttcagcatttccagaatcccctcaccacaaagcccgcaaaatctggtaaactatcatccaattttctgcccaaatggctgggattgttcattttttgtttgccttacaacgagagtgacagtacgcgcgggtagttaactcaacatctgaccggtcgat

SEQ ID NO: 150 - DNA, 1538 bp, Unknown
  Enterobacter sp.
  gene (1)..(1538): 16S
  misc_feature (62)..(62): n is a, c, t, g, unknown or other
  misc_feature (265)..(265): n is a, c, t, g, unknown or other
  misc_feature (457)..(457): n is a, c, t, g, unknown or other
  misc_feature (469)..(469): n is a, c, t, g, unknown or other
  misc_feature (539)..(539): n is a, c, t, g, unknown or other
  misc_feature (551)..(552): n is a, c, t, g, unknown or other
  misc_feature (559)..(559): n is a, c, t, g, unknown or other
  misc_feature (561)..(561): n is a, c, t, g, unknown or other
  misc_feature (576)..(576): n is a, c, t, g, unknown or other
  misc_feature (587)..(587): n is a, c, t, g, unknown or other
  misc_feature (591)..(591): n is a, c, t, g, unknown or other
  misc_feature (655)..(657): n is a, c, t, g, unknown or other
  misc_feature (665)..(665): n is a, c, t, g, unknown or other
  misc_feature (678)..(678): n is a, c, t, g, unknown or other
  misc_feature (706)..(706): n is a, c, t, g, unknown or other
  misc_feature (710)..(710): n is a, c, t, g, unknown or other
  misc_feature (714)..(714): n is a, c, t, g, unknown or other
  misc_feature (718)..(718): n is a, c, t, g, unknown or other
  misc_feature (735)..(735): n is a, c, t, g, unknown or other
  misc_feature (755)..(755): n is a, c, t, g, unknown or other
  misc_feature (759)..(759): n is a, c, t, g, unknown or other
  misc_feature (796)..(796): n is a, c, t, g, unknown or other
  misc_feature (1006)..(1007): n is a, c, t, g, unknown or other
  misc_feature (1016)..(1017): n is a, c, t, g, unknown or other
  misc_feature (1133)..(1133): n is a, c, t, g, unknown or other
ttgaagagtttgatcatggctcagattgaacgctggcggcaggcctaacacatgcaagtcgngcggaagcacaggagagcttgctctctgggtgacgagcggcggacgggtgagtaatgtctgggaaactgcctgatggagggggataactactggaaacggtagctaataccgcataacgtcgcaagaccaaagagggggaccttcgggcctcttgccatcagatgtgcccagatgggattagctagtaggtggggtaacggcncacctaggcgacgatccctagctggtctgagaggatgaccagccacactggaactgagacacggtccagactcctacgggaggcagcagtggggaatattgcacaatgggcgcaagcctgatgcagccatgccgcgtgtatgaagaaggccttcgggttgtaaagtactttcagcggggaggaaggtgttgnggttaataaccncagcaattgacgttacccgcagaagaagcaccggctaactccgtgccagcagccgcggtaatacggaggntgcaagcgttanncggaatnantgggcgtaaagcgtncgcaggcggtntgtnaagtcggatgtgaaatccccgggctcaacctgggaactgcattcgaaactggcaggctagagtnnngtagaggngggtagaattccnggtgtagcggtgaaatgcgtagagatcnggangaanaccngtggcgaaggcggcccnctggacaaagactgacgctnaggngcgaaagcgtggggagcaaacaggattagataccctngtagtccacgccgtaaacgatgtcgacttggaggttgtgcccttgaggcgtggcttccggagctaacgcgttaagtcgaccgcctggggagtacggccgcaaggttaaaactcaaatgaattgacgggggcccgcacaagcggtggagcatgtggtttaattcgatgcaacgcgaagaaccttacctactcttgacatccagagaacttnncagagatgnnttggtgccttcgggaactctgagacaggtgctgcatggctgtcgtcagctcgtgttgtgaaatgttgggttaagtcccgcaacgagcgcaacccttatcctttgttgccagcggtncggccgggaactcaaaggagactgccagtgataaactggaggaaggtggggatgacgtcaagtcatcatggcccttacgagtagggctacacacgtgctacaatggcgcatacaaagagaagcgacctcgcgagagcaagcggacctcataaagtgcgtcgtagtccggattggagtctgcaactcgactccatgaagtcggaatcgctagtaatcgtagatcagaatgctacggtgaatacgttcccgggccttgtacacaccgcccgtcacaccatgggagtgggttgcaaaagaagtaggtagcttaaccttcgggagggcgcttaccactttgtgattcatgactggggtgaagtcgtaacaaggtaaccgtaggggaacctgcggttggatcacctcctt

SEQ ID NO: 151 - DNA, 882 bp, Unknown
  Enterobacter sp.
  gene (1)..(882): nifH
atgaccatgcgtcaatgtgccatttacggcaaaggtggtatcggtaaatccactaccacgcaaaacctggtcgccgcgctggcggagatgggcaagaaagtaatgatcgtcggctgcgacccgaaagcagactccactcgtctgatcctgcatgcgaaagcgcagaacaccattatggagatggcggctgaagtcggctccgtggaagaccttgaactggaagatgtgctgcaaatcggttacggcgacgtacgctgcgcagaatccggcggcccggaaccaggcgttggctgtgctggtcgcggggtaattaccgccatcaacttcctggaagaagaaggcgcctatgttcccgacctcgatttcgtcttttacgacgtgttgggcgacgtggtgtgcggggggttcgccatgccgattcgcgaaaacaaagcgcaggagatctacatcgtctgctccggcgaaatgatggcgatgtacgccgccaacaacatctctaaaggcatcgtgaaatacgccaaatccggcaaagtgcgccttggcgggctgatctgtaactcccgtcagaccgaccgcgaagatgagctgatcatagcgctggcggaaaaactcggcacccagatgatccacttcgtgccgcgcgacaacatcgtgcaacgcgctgaaatccgccgtatgacggtgattgagtacgatccgaaatgcaaccaggccaatgaataccgcacgctggcgaacaagatcgtcaacaacaccaaaatggtcgtgccaacgcccatcaccatggacgaactggaagagctgttgatggaattcggcattatggatgtggaagacaccagcattatcggtaaaaccgccgcagaagaaaacgcggtttga

SEQ ID NO: 152 - DNA, 1449 bp, Unknown
  Enterobacter sp.
  gene (1)..(1449): nifD1
atgagcaatgcaacaggcgaacgtaatctggagatcatccaggaagtgctggagatctttccggaaaaaacgcgcaaagaacgcagaaagcacatgatggtgagcgacccggagatggaaagcgtcgggaaatgcatcatctccaaccgtaagtcgcagcccggcgtaatgaccgtgcgcggttgctcttacgccggttctaaaggggtggtattcgggccgatcaaagatatggcccatatttcccacggcccggtcggctgcggtcagtactcccgcgccgggcggcgtaactactacaccggcgtcagcggtgtggatagcttcggtacgctcaactttacctccgattttcaggagcgcgatatcgtgtttggcggcgataaaaagctgaccaaactgattgaagagatggagacgctgttcccgctgaccaaagggatctccattcagtccgaatgcccggtcggcctgattggcgacgacattgaagccgttgccaacgccagccgcaaagccatcaataaaccggtcattccggtgcgctgcgaaggttttcgcggcgtttcccagtcactcggtcaccacattgccaacgacgtgatccgcgactgggtactggataaccgcgaaggcaagccgtttgaggccggtccttatgacgtggcgatcatcggcgattacaacatcggcggcgatgcctgggcgtcgcgcattttgctcgaagagatgggcctgcgcgtggtggcgcagtggtccggcgacggcacgctggttgagatggagaacacgccgttcgtcaaactcaaccttgtgcactgctaccgctcaatgaactatatctcccgccatatggaggagaaacacggtattccgtggatggagtacaacttcttcggtccgaccaaagtcgccgaatcgttgcgcaaaatcgccgatatgtttgatgacaccattcgcgccaacgccgaagcggtgatcgccaaatatcaggcgcagaacgacgccatcatcgccaaataccgtccgcgtctggaaggccgcaaagtgctgctgtatatgggcggtttacgtcctcgccatgtgattggcgcttatgaagatctggggatggaaattatcgctgcgggttatgaattcgcccacaacgatgactacgaccgcaccctgccggatctgaaagaaggcaccttgctgttcgacgatgccagcagttatgaactggaagcctttgtcaaagcgctgaagccggatctgatcggctccggcattaaagagaagtacatcttccagaaaatgggcgtgccgtttcgccagatgcactcctgggattactccggcccctatcacggttatgacggctttgccatcttcgcccgcgatatggatatgacgatcaacaaccccgcgtggggccagttgaccgcgccgtggctgaaatccgcctga

SEQ ID NO: 153 - DNA, 1092 bp, Unknown
  Enterobacter sp.
  gene (1)..(1092): nifD2
  misc_feature (709)..(709): n is a, c, t, g, unknown or other
atgggacgcggcgagcgccgcctgttccatgccgtgcgccacatcgtcaaccgctaccacccggccgccgtctttatctataacacctgcgttcccgcgatggagggcgacgatatcgaagccgtctgccaggcggcagaaaccgccatcggcgtaccggtgattgccgttgatgtcgccgggttttacggcagcaaaaatctcggcaaccggttggccggtgaagtgatggtgaaaaaggtgattggcgggcgtgaacccgcgccgtggccggaagataccccttttgccccggcgcaccgccacgatatcgggctgattggcgaattcaatattgccggagagttctggcatattcagccgctgctcgatgagctgggtattcgcgtgctcggcagcctctccggcgacgggcgcttcagtgaaatccagacgctgcaccgggcgcaggtcaatatgctggtctgctccagggcgctgatcaacgtcgcccgctcgctggagcagcgctacggcacgccgtggtttgaaggcagtttttatggtgttcgcgccacctctgacgccctgcgccaactggcggcgctgaccggagaccgcgatctgatgcagcgcaccgaacagctcattgcccgcgaagagcagcaaacagagcaggcgctggccccgctgcgcgagcgcctgcgcgggcgcaaagcgctgctctatnccggcggcgtgaaatcctggtcggtggtttcggcgcttcaggatctgggcatggaagtggtggcgaccggcacgcgcaaatccaccgaagaggataaacagcgcatccgcgaactgatgggcgccgacgcgctgatgcttgatgaaggtaacgcccgctcgctgctggacgtggtttaccgctacaaggcggacatgatgatcgccgggggacgcaatatgtacaccgcctacaaagcgcggctgccgttcctcgatatcaatcaggagcgcgagcacgcctttgccggctaccgcggcattgtcaccctggccgaacagctctgcctgaccatggaaagcccggtctggccgcaaacccattcccgcgcaccgtggcaataa

SEQ ID NO: 154 - DNA, 846 bp, Unknown
  Enterobacter sp.
  gene (1)..(846): nifK
atgatggagcaaatggacgtgccgtgcagcctgctttccgatccctccgaagtgctggataccccggctgacgggcattaccacatgtatgcgggcggtacgacccagcaggagatgcgcgaagcgcctgacgctatcgacaccctgctgctgcaaccctggcaactggtgaaaaccaaaaaagtggtgcaggaaagctggaaccagcccgctaccgaggtgcaaatcccaatggggctggccggaaccgacgagctgctgatgacggtaagccagttaaccggcaaagccattccggatagcttagcgctggaacgcggtcggctggtggatatgatgctcgactcccacacctggctgcacggcaagaaattcggcctgttcggtgacccggattttgtcatggggctgacccgcttcctgctggaactgggctgcgaaccgacggtgattctgtgccataacggcagcaagcgctggcagaaagcgatgaagaaaatgcttgaagcctcgccgtacgggaaagagagcgaagtctttatcaactgcgatttgtggcatttccgctcgctgatgtttacccgtcagccggactttatgatcggcaactcctacgccaagtttatccagcgcgatacgctggcgaagggtgagcagtttgaagtgccgctgatccgcctggggttcccgctgttcgatcgccaccatctgcaccgccagaccacctggggttacgaaggggccatgagtatcctcaccacgctggttaatgcggtgctggagaaagtcgacagagagaccatcaagctcggcaaaaccgactacagcttcgatcttatccgttaa

SEQ ID NO: 155 - DNA, 1095 bp, Unknown
  Enterobacter sp.
  gene (1)..(1095): nifL
  misc_feature (942)..(942): n is a, c, t, g, unknown or other
atgcagcgcgacatcagcaccagctacgcgctggaacaacggctgcgcaatcatatgacgctgaccgaagccgtcttgaataacattccggcggcggttgtagtggtggatgaacgcgatcgggtggtgatggataacctcgcctacaaaaccttttgcgccgattgcggcggtaaagaactactcaccgaaatcaacttttccgcccataaggcggagctggcgcagggcctggtactgccggtagtgctgcgcggcaccgtgcgctggttgtccgttacctgttgggcgctgccgggcgtcagcgaagaagcaggccgctactttattgatagcgccgtgccgcgcacgctggtggtgatcaccgataatactcagcagcagcaacaacaggagcaggggcgtcttgatcgtctgaagcagcagataaccagcggtaaattgctggcggcgatccgcgaatcgctggacgccgcgctggtacaactcaattgcccaattaatatgctggccgccgcacgccgcttaaatggcgacgagcatagcaatctggcgctggatgccgcatggcgtgaaggcgaagaagcgatggcgcggttgcagcgctgccgcccgtcgctggaactggaaagcccggcagtctggccgctccagccgttccttgacgatctgcgtgccctgtatcacacccgatataaccagggcgaaaacctgcaaattgagctggaatcccccgacctggtgggctttggccagcgaacacaactgcttgcctgcctgagcctgtggctcgacagaaccctggatattgccgcggagctacgtgatttcacggtacagactcaactttacgcccgcgaagagagcggctggctgtcgttctatttaaacgacaatgtgccgctgattcaggtgcgctacacccattcacccgatgcactnaatgcgcccggtaaaggcatggagctgcggctgatccagacgctggtcgcccaccatcgaggcgcaatagaactgacctcacgccctcagggaggcacctgtctgatcctgcgtttcccattattttactcgctgacaggaggctcactatga

SEQ ID NO: 156 - DNA, 219 bp, Unknown
  Enterobacter sp.
  gene (1)..(219): nifA partial gene
atgactcagcgaaccgagtcgggtacaaccgtctggcgctttgacctctcccaacagtttacagccatgcagcgtatcagtgtggtgttaagccgcgcgacggagatcgggcagacgctacaggaagtgctgtgcgtgctgcacaacgatgcctttatgcagcacgggatgatctgtccgtacgcgcgggtgcgcgtcttcgcgagcgtatggctttga

SEQ ID NO: 157 - DNA, 1635 bp, Unknown
  Enterobacter sp.
  gene (1)..(1635): glnE
  misc_feature (234)..(234): n is a, c, t, g, unknown or other
  misc_feature (274)..(274): n is a, c, t, g, unknown or other
  misc_feature (1535)..(1535): n is a, c, t, g, unknown or other
atgcgcgtggaagactggtcaacgctgaccgaacggctcgatgcccatatggcaggcgtgcgccgaatctttaacgaactgatcggtgatgacgaaagtgagtcgcaggacgatgcgctctccgagcactggcgcgagctgtggcaggacgcgcttcaggaagatgacaccacgccggtgctgacgcacttaaccgacgacgcgcgccatcgcgtggtggcgctgatcgctganttccgtcttgagctgaacaaacgcgccatcggcccgcgtngtcgccaggtgctggatcacctgatgccgcacctgctgagcgaagtctgctcgcgtgccgatgcgccggtgccgctgtcgcggatgatgcccctgctgagcgggattatcacccgtactacctaccttgaactcctgagcgagttccctggcgcgcttaagcacctgatttcactctgcgccgcgtcgccgatggtggccaacaagctggcgcgttacccgctgctgctggatgagctgctcgatccgaataccctttatcaaccgacggcgaccgacgcctaccgggacgaactgcgtcagtatctgctgcgcgtgccggaagaagacgaagagcaacagctggaggcgctgcgtcagtttaagcaggcccagatgctgcgcgtggcggccgcagatattgccggaacgctgccggtgatgaaagtgagcgatcacttaacctggcttgcggaagcgattatcgacgcggtggtgcatcaggcctgggtgcagatggtggcgcgctatggccagccgaaacatctggctgaccgtgatggtcgcggcttcgcggtggtgggttacggtaagctcggcggttgggagctgggctatagctccgatctggatttaatcttcctccacgactgcccggttgatgtgatgaccgacggcgagcgcgagattgacgggcgtcagttctacctgcgcctggcgcagcgcatcatgcacctgttcagcacccgcacctcgtcgggcattttgtatgaagtggatgcccgtctgcgcccgtccggcgcggcgggcatgctggtcacctcgacggagtccttcgctgattaccagaagaatgaagcctggacgtgggagcatcaggcgctggtgcgcgcccgtgtggtgtatggcgatccgctgctgaaaacgcagtttgacgtgattcgtaaggaagtcatgaccaccgtgcgcgatggcagcacgctgcaaacggaagtgcgcgaaatgcgcgagaaaatgcgcgcgcacttaggcaataaacatcgcgatcgctttgatattaaagccgatgagggcggtattaccgatattgagtttattacccagtatctggtgttgctgcacgcgcatgacaagccgaagctgacgcgctggtcggataacgtgcgcattctggaactgctggcgcaaaacgacattatggacgagcaggaggcgcaggccttaacccgtgcctatacaacgcttcgcgatgagctccatcatctggcgttgcaggagcagcngggacacgtggcgctggactgtttcaccgctgaacgcgctcaggtaacggccagctggcagaagtggctggtggaaccgtgcgtaacaaatcaagtgtga

SEQ ID NO: 158 - DNA, 1316 bp, Unknown
  Enterobacter sp.
  gene (1)..(1316): 16S
  misc_feature (43)..(43): n is a, c, t, g, unknown or other
  misc_feature (247)..(247): n is a, c, t, g, unknown or other
  misc_feature (784)..(785): n is a, c, t, g, unknown or other
  misc_feature (794)..(795): n is a, c, t, g, unknown or other
agatgtgcccagatgggattagctagtaggtggggtaacggcncacctaggcgacgatccctagctggtctgagaggatgaccagccacactggaactgagacacggtccagactcctacgggaggcagcagtggggaatattgcacaatgggcgcaagcctgatgcagccatgccgcgtgtatgaagaaggccttcgggttgtaaagtactttcagcggggaggaaggtgttgtggttaataaccncagcaattgacgttacccgcagaagaagcaccggctaactccgtgccagcagccgcggtaatacggagggtgcaagcgttaatcggaattactgggcgtaaagcgcacgcaggcggtctgtcaagtcggatgtgaaatccccgggctcaacctgggaactgcattcgaaactggcaggctagagtcttgtagaggggggtagaattccaggtgtagcggtgaaatgcgtagagatctggaggaataccggtggcgaaggcggccccctggacaaagactgacgctcaggtgcgaaagcgtggggagcaaacaggattagataccctggtagtccacgccgtaaacgatgtcgacttggaggttgtgcccttgaggcgtggcttccggagctaacgcgttaagtcgaccgcctggggagtacggccgcaaggttaaaactcaaatgaattgacgggggcccgcacaagcggtggagcatgtggtttaattcgatgcaacgcgaagaaccttacctactcttgacatccagagaacttnncagagatgnnttggtgccttcgggaactctgagacaggtgctgcatggctgtcgtcagctcgtgttgtgaaatgttgggttaagtcccgcaacgagcgcaacccttatcctttgttgccagcggtccggccgggaactcaaaggagactgccagtgataaactggaggaaggtggggatgacgtcaagtcatcatggcccttacgagtagggctacacacgtgctacaatggcgcatacaaagagaagcgacctcgcgagagcaagcggacctcataaagtgcgtcgtagtccggattggagtctgcaactcgactccatgaagtcggaatcgctagtaatcgtagatcagaatgctacggtgaatacgttcccgggccttgtacacaccgcccgtcacaccatgggagtgggttgcaaaagaagtaggtagcttaaccttcgggagggcgcttaccactttgtgattcatgactggggtgaagtcgtaacaaggtaaccgtaggggaacctgcggttggatcacctcctt

SEQ ID NO: 159 - DNA, 882 bp, Unknown; identical to SEQ ID NO: 151
  Enterobacter sp.
  gene (1)..(882): nifH

SEQ ID NO: 160 - DNA, 1449 bp, Unknown; identical to SEQ ID NO: 152
  Enterobacter sp.
  gene (1)..(1449): nifD1

SEQ ID NO: 161 - DNA, 1374 bp, Unknown
  Enterobacter sp.
  gene (1)..(1374): nifD2
atgaaggggaacgagatcctggctttgctcgatgaacctgcctgcgagcacaaccataaacagaaatccggctgcagcgcgccgaaacccggcgcgacagcgggcggctgcgcctttgacggtgcgcagatcaccctgctgccactctccgatgttgcccacctggtacacggccccattggttgtaccggtagctcatgggataaccgtggcagcttcagttccggcccgacgatcaaccggctgggttttaccaccgatctgagcgaacaggatgtgatcatgggacgcggcgagcgccgcctgttccatgccgtgcgccacatcgtcaaccgctaccacccggccgccgtctttatctataacacctgcgttcccgcgatggagggcgacgatatcgaagccgtctgccaggcggcagaaaccgccatcggcgtaccggtgattgccgttgatgtcgccgggttttacggcagcaaaaatctcggcaaccggttggccggtgaagtgatggtgaaaaaggtgattggcgggcgtgaacccgcgccgtggccggaagataccccttttgccccggcgcaccgccacgatatcgggctgattggcgaattcaatattgccggagagttctggcatattcagccgctgctcgatgagctgggtattcgcgtgctcggcagcctctccggcgacgggcgcttcagtgaaatccagacgctgcaccgggcgcaggtcaatatgctggtctgctccagggcgctgatcaacgtcgcccgctcgctggagcagcgctacggcacgccgtggtttgaaggcagtttttatggtgttcgcgccacctctgacgccctgcgccaactggcggcgctgaccggagaccgcgatctgatgcagcgcaccgaacagctcattgcccgcgaagagcagcaaacagagcaggcgctggccccgctgcgcgagcgcctgcgcgggcgcaaagcgctgctctataccggcggcgtgaaatcctggtcggtggtttcggcgcttcaggatctgggcatggaagtggtggcgaccggcacgcgcaaatccaccgaagaggataaacagcgcatccgcgaactgatgggcgccgacgcgctgatgcttgatgaaggtaacgcccgctcgctgctggacgtggtttaccgctacaaggcggacatgatgatcgccgggggacgcaatatgtacaccgcctacaaagcgcggctgccgttcctcgatatcaatcaggagcgcgagcacgcctttgccggctaccgcggcattgtcaccctggccgaacagctctgcctgaccatggaaagcccggtctggccgcaaacccattcccgcgcaccgtggcaataa

SEQ ID NO: 162 - DNA, 1563 bp, Unknown
  Enterobacter sp.
  gene (1)..(1563): nifK1
atgagccaaagtgctgagaaaattcaaaactgtcatccgctgtttgaacaggatgcgtaccagatgctgtttaaagataaacggcaactggaagaggcccacgatccggcgcgcgtgcaggaggtctttcaatggaccaccaccgccgagtatgaagcgcttaactttcaacgcgaagcgctgactatcgatccggccaaagcctgccagccgctgggtgcggtactgtgctcgctgggctttgccaataccctgccctatgttcacggctcccaggggtgcgtggcctatttccgcacctattttaaccgtcactttaaagagccgattgcctgtgtttctgactcgatgacggaagatgcggcagtattcggcggcaacaacaacctgaacaccgggttgcagaacgccagcgccctctacaagccggaaatcattgccgtctccaccacctgtatggcggaggtcatcggcgacgacctgcaggcgtttattgctaacgccaaaaaagacggctttatcgacgcggcgatcccggtgccttacgcgcacacgccaagctttatcggcagccatatcaccggctgggacaatatgtttgagggcttcgcccgtacctttaccgccgattacagcggacaaccgggcaaattaccgcgtatcaatctggtcagcggatttgaaacctatctcggtaatttccgcgtgctgaaacgcatgatggagcaaatggacgtgccgtgcagcctgctttccgatccctccgaagtgctggataccccggctgacgggcattaccacatgtatgcgggcggtacgacccagcaggagatgcgcgaagcgcctgacgctatcgacaccctgctgctgcaaccctggcaactggtgaaaaccaaaaaagtggtgcaggaaagctggaaccagcccgctaccgaggtgcaaatcccaatggggctggccggaaccgacgagctgctgatgacggtaagccagttaaccggcaaagccattccggatagcttagcgctggaacgcggtcggctggtggatatgatgctcgactcccacacctggctgcacggcaagaaattcggcctgttcggtgacccggattttgtcatggggctgacccgcttcctgctggaactgggctgcgaaccgacggtgattctgtgccataacggcagcaagcgctggcagaaagcgatgaagaaaatgcttgaagcctcgccgtacgggaaagagagcgaagtctttatcaactgcgatttgtggcatttccgctcgctgatgtttacccgtcagccggactttatgatcggcaactcctacgccaagtttatccagcgcgatacgctggcgaagggtgagcagtttgaagtgccgctgatccgcctggggttcccgctgttcgatcgccaccatctgcaccgccagaccacctggggttacgaaggggccatgagtatcctcaccacgctggttaatgcggtgctggagaaagtcgacagagagaccatcaagctcggcaaaaccgactacagcttcgatcttatccgttaa

SEQ ID NO: 163 - DNA, 1386 bp, Unknown
  Enterobacter sp.
  gene (1)..(1386): nifK2
atggcagaaattatccgtagtaaaaagccgctggccgtcagcccggtaaaaagtggccagccgctgggcgcgattctggcgagcatgggctttgaacagagcattccgctggttcatggcgctcaggggtgcagcgccttcgcgaaggtcttttttatccagcattttcacgatccgatcccgctgcaatcgacggcaatggacccgacatcgaccattatgggtgccgatgagaacatctttaccgcgctgaatgtgctgtgttcacgcaacaacccgaaagcgattgttctgctgagcactggcctttccgaggcgcagggcagcgatatttcgcgcgtggtgcgccagttccgcgatgaatatccgcgccataaaggggtggcgctgctgaccgtcaacacgccggatttttacggcagcctggaaaacggctacagcgcggtgctggagagcatggttgaacagtgggtgccggaaaaaccgcagccgggcgtgcgcaatcgccgcgtgaacctgctgctcagccatttgcttacgccgggcgacattgagctgctgcgaagttatgtcgaggcatttggcctgcagccggtgatggtgccggatctttcccagtcgctggatggccatctcgccagcggggatttctcgccaattacccagggcggcagcagcctgcggctgattgaacagatgggacagagtcttggcacgttcgccattggcgtatccctctcccgcgccgcgcaattgctggcgcagcgcagccatgcggaagtggtcaccctgccgcatctgatgaccatgagccagtgcgatacgtttattcatcaactgaagcgcctctccgggcgcgatgttccggcgtggatcgaacgccagcgcgggcaactgcaggatgcgatgatcgattgtcatatgtggttgcagggcgcgcctgtcgcgctggccgccgagggcgatctgctcgccgcctggtgcgatttcgcctgcgatatgggcatggtgcccggcccggtggtggcgccggtgagccagaaagggttgcaggatctgccggtcgaaaaagtcattatcggcgatctggaggatatgcaggatctgttgtgtgaaacgcctgcatcgctgctcgtctctaattctcacgccgctgatttggccgggcagttcgacattccgctggtgcgcgccggtttccccctgttcgaccgtctgggcgagtttcgccgcgtgcgccagggttacgccgggatgcgcgacaccttgtttgagctggcgaatgcgctgcgcgatcgccatcatcatcttgccgcttatcactcgccgctgcgccagcgtttttacgaacccgcatcttcgggaggtgactatgcaacatgttaa

SEQ ID NO: 164 - DNA, 1488 bp, Unknown
  Enterobacter sp.
  gene (1)..(1488): nifL
atgaccctgaatatgatgatggacgccaccgcgcccgccgagatcgccggagcgctctcacaacagcatcccgggttgtttttcaccatggttgaacaggcgcccgtcgcgatttcactgaccgatgccgatgcccacattctctacgccaaccccgcgttttgtcgccagtcggggtatgaactggaagagttgttgcagcaaaacccgcgcctgcttgccagtaagcagacgccgcgtgaaatctaccaggaaatgtggcacaccctgctgcaacaccgtccgtggcgcggacaactgatcaaccgtcgccgcgacggcagcctgtttctggtggaaatcgacatcaccccactgtttgatgcgttcggcaaactcgaacattacctggccatgcagcgcgacatcagcaccagctacgcgctggaacaacggctgcgcaatcatatgacgctgaccgaagccgtcttgaataacattccggcggcggttgtagtggtggatgaacgcgatcgggtggtgatggataacctcgcctacaaaaccttttgcgccgattgcggcggtaaagaactactcaccgaaatcaacttttccgcccataaggcggagctggcgcagggcctggtactgccggtagtgctgcgcggcaccgtgcgctggttgtccgttacctgttgggcgctgccgggcgtcagcgaagaagcaggccgctactttattgatagcgccgtgccgcgcacgctggtggtgatcaccgataatactcagcagcagcaacaacaggagcaggggcgtcttgatcgtctgaagcagcagataaccagcggtaaattgctggcggcgatccgcgaatcgctggacgccgcgctggtacaactcaattgcccaattaatatgctggccgccgcacgccgcttaaatggcgacgagcatagcaatctggcgctggatgccgcatggcgtgaaggcgaagaagcgatggcgcggttgcagcgctgccgcccgtcgctggaactggaaagcccggcagtctggccgctccagccgttccttgacgatctgcgtgccctgtatcacacccgatataaccagggcgaaaacctgcaaattgagctggaatcccccgacctggtgggctttggccagcgaacacaactgcttgcctgcctgagcctgtggctcgacagaaccctggatattgccgcggagctacgtgatttcacggtacagactcaactttacgcccgcgaagagagcggctggctgtcgttctatttaaacgacaatgtgccgctgattcaggtgcgctacacccattcacccgatgcactcaatgcgcccggtaaaggcatggagctgcggctgatccagacgctggtcgcccaccatcgaggcgcaatagaactgacctcacgccctcagggaggcacctgtctgatcctgcgtttcccattattttactcgctgacaggaggctcactatga

SEQ ID NO: 165 - DNA, 1575 bp, Unknown
  Enterobacter sp.
  gene (1)..(1575): nifA
atgactcagcgaaccgagtcgggtacaaccgtctggcgctttgacctctcccaacagtttacagccatgcagcgtatcagtgtggtgttaagccgcgcgacggagatcgggcagacgctacaggaagtgctgtgcgtgctgcacaacgatgcctttatgcagcacgggatgatctgtctgtacgacagtaagcaagcgatcctttccattgaagccttgcatgaggccgatcagcagttaattcccggcagttcacagattcgctaccgtccgggcgaagggctggtaggcacggtgctttcacagggacagtcgctggtactgccctgtgtctccgacgatcggcgttttctcgatcgcctgggattgtatgattacagcttgccgtttatcgccgtgccgctgatggggccaaactcgcagcctatcggcgtgctggccgcccagcctatggcgcgttacgaggagcggctgcccgcctgcacgcgttttcttgaaaccgtcgccaatctggtggcgcaaaccgttcgcctgatgacaccgcccagcgtcgcgtctccaccccgtgctgctgccgcgcagattgccagccagcgcgggtgcgcgtcttcgcgagcgtatggctttgaaaacatggtcggtaaaagcgcggctatgcgtcagacgctggaaattattcgccaggtatcacgctgggacaccaccgtgctggtgcgtggcgaaagcggaaccggtaaagagttgatagccaacgctatccaccacaattcaccgcgcgccgccgcgccgtttgtcaaattcaactgcgcggcgctgcccgatacgctgctggagagtgaactcttcggtcatgaaaaaggcgcgtttaccggcgcggtgcgccagcgcaaaggccgtttcgaactggcggatggcggtacgctgtttcttgatgagatcggcgaaagtagcgcctcgtttcaggcgaaattgctgcgtatcttgcaggaaggcgaaatggaacgcgtcggcggcgacgaaacgctgcgggtgaatgtacggatcattgccgccaccaaccgcaatctggaagaggaagtgcggctgggtaattttcgcgaagatctctactatcgccttaatgtgatgccgatctccctgcccccgctccgcgagcgtcaggaggacatcgtcgagctggcgcattttctggtgcgcaaaatcgcgcaaaaccagaaccgcacgctgcgcatcagcgatggcgcgatccgtttgttgatgagctatagctggcctggaaacgtgcgtgagctggaaaactgccttgagcgatcggcggtgatgtcggaaaacgggctgatcgatcgcgacgtgattttgtttcaccacagggaaaatctgccaaaaacgccacagaccagtgcgccgcgcgaagagagctggctcgatcagaacctcgatgagcgacaaagattgatcgccgcgctggagaaagccggttgggtacaggcaaaagccgcgcgcctgctgggaatgaccccgcgccaggtggcctatcgtattcagacgatggacattgccatgccgagattgtag

SEQ ID NO: 166 - DNA, 2856 bp, Unknown
  Enterobacter sp.
  gene (1)..(2856): glnE
atgccgctttcttcgcagttacagcagcagtggcagaccgtttgcgaacgtctgcctgagtcattaccggcgtcatcgttaagcgagcaggcaaagagcgtgctcgtcttcagtgattttgtgcaggaaagtatcaccgccaacccgaactggctggcggaacttgagaacgcaccaccgcaggcagaagagtggcggcactatgctggctggctgcaaactgtactcgaagacgttacggatgaggccacgctgatgcgcgtcctgcgccagttccgtcgtcgggtgatggtgcgcattgcctgggctcaggcgctggaactggtgagcgaagagagtacgctgcagcagttaagcgagctggcgcaaacgttgattgtcgccgcgcgagactggctctatgccgcctgctgtaaagagtggggcacgccgtgcagcgaggaaggggttcctcagccgctgttgattctggggatgggaaagctgggcggctgcgagctgaacttctcctctgatatcgacctgatttttgcctggccggagaacggctccacgcgcggaggccgccgcgagctggacaacgcgcagttctttacccgtctcggccagcgcctgattaaagcgctggatcagcccacgcaggacggttttgtttaccgcgtggacatgcgcctgcgtccgtttggcgacagcgggccgctggtgctgagctttgcggcgctggaagattattaccaggagcaaggtcgcgactgggagcgttacgcgatggtcaaagcgcggatcatgggcgacagcgacgacgcttatgccaacgagctgcgcgccatgctgcgtccgttcgtgttccgtcgctatatcgacttcagcgtcatccagtccctgcgaaatatgaaagggatgattgcccgcgaggtgcgccgccgtgggctgaaagacaatatcaagctcggtgcgggcggcatccgcgaaatcgaatttatcgtccaggtcttccagcttattcgcggcggacgcgagccgtcgctgcagtcccgttccttattaccgacgctgagcgccattgcgcagctgcatctcctgccggacggcgacgcgcaaaccctgcgcgaggcctatcttttcctgcgtcgtctggaaaacctgctgcaaagcattaatgacgaacagacccaaaccctgccgggcgacgaccttaaccgggcgcgtctggcctggggaatgcgcgtggaagactggtcaacgctgaccgaacggctcgatgcccatatggcaggcgtgcgccgaatctttaacgaactgatcggtgatgacgaaagtgagtcgcaggacgatgcgctctccgagcactggcgcgagctgtggcaggacgcgcttcaggaagatgacaccacgccggtgctgacgcacttaaccgacgacgcgcgccatcgcgtggtggcgctgatcgctgatttccgtcttgagctgaacaaacgcgccatcggcccgcgtggtcgccaggtgctggatcacctgatgccgcacctgctgagcgaagtctgctcgcgtgccgatgcgccggtgccgctgtcgcggatgatgcccctgctgagcgggattatcacccgtactacctaccttgaactcctgagcgagttccctggcgcgcttaagcacctgatttcactctgcgccgcgtcgccgatggtggccaacaagctggcgcgttacccgctgctgctggatgagctgctcgatccgaataccctttatcaaccgacggcgaccgacgcctaccgggacgaactgcgtcagtatctgctgcgcgtgccggaagaagacgaagagcaacagctggaggcgctgcgtcagtttaagcaggcccagatgctgcgcgtggcggccgcagatattgccggaacgctgccggtgatgaaagtgagcgatcacttaacctggcttgcggaagcgattatcgacgcggtggtgcatcaggcctgggtgcagatggtggcgcgctatggccagccgaaacatctggctgaccgtgatggtcgcggcttcgcggtggtgggttacggtaagctcggcggttgggagctgggctatagctccgatctggatttaatcttcctccacgactgcccggttgatgtgatgaccgacggcgagcgcgagattgacgggcgtcagttctacctgcgcctggcgcagcgcatcatgcacctgttcagcacccgcacctcgtcgggcattttgtatgaagtggatgcccgtctgcgcccgtccggcgcggcgggcatgctggtcacctcgacggagtccttcgctgattaccagaagaatgaagcctggacgtgggagcatcaggcgctggtgcgcgcccgtgtggtgtatggcgatccgctgctgaaaacgcagtttgacgtgattcgtaaggaagtcatgaccaccgtgcgcgatggcagcacgctgcaaacggaagtgcgcgaaatgcgcgagaaaatgcgcgcgcacttaggcaataaacatcgcgatcgctttgatattaaagccgatgagggcggtattaccgatattgagtttattacccagtatctggtgttgctgcacgcgcatgacaagccgaagctgacgcgctggtcggataacgtgcgcattctggaactgctggcgcaaaacgacattatggacgagcaggaggcgcaggccttaacccgtgcctatacaacgcttcgcgatgagctccatcatctggcgttgcaggagcagccgggacacgtggcgctggactgtttcaccgctgaacgcgctcaggtaacggccagctggcagaagtggctggtggaaccgtgcgtaacaaatcaagtgtga

SEQ ID NO: 167 - DNA, 1290 bp, Unknown
  Enterobacter sp.
  gene (1)..(1290): amtB
atgaagatagcaacacttaaaacgggtctgggttcgctggcactgctgccgggcctggcgctggctgctgcacctgcggtggcagacaaagccgataacgcctttatgatgatcagcaccgcgctggtgctgttcatgtccattccgggcattgcgctgttctatggcggcctgatccgtggcaaaaacgttctctccatgctgacgcaggttgccgtaacgttcgcgctggtctgcgtactgtgggtggtttacggttactcgctggctttcggcacgggcaacgcgttctttggtaacttcgactgggtgatgctgaaaaatattgaactgaccgcgctgatgggcagtttctaccagtatattcacgttgctttccagggctcgttcgcctgcattaccgtcgggctgattgtaggcgcgcttgccgagcgtattcgtttctctgcggtcctgatcttcgtggtggtctggctgacgctctcctatgtgccgattgcgcacatggtctggggtggcggtctgctggcgacgcatggcgcgctggacttcgcgggcggtaccgttgtgcacattaacgccgcggtagcgggtctggttggcgcatacctgattggcaaacgcgtgggcttcggtaaagaagcgttcaaaccgcacaacctgccgatggtcttcaccggtaccgcgatcctctactttggctggtttggtttcaacgccggctcagcaagtgccgcgaacgaaatcgccgcgctggccttcgtgaataccgttgtggccacggcaggtgcaatcctctcctgggtctttggcgagtgggctgtgcgcggtaaaccttctctgctgggtgcctgttcgggggcgattgctggtctggtcggtatcaccccagcatgtggttatgtcggtgtgggtggcgcgctgctggtcggcctggtgtcaggtctggcgggtctgtggggcgtgacggcgctgaaacgtattctgcgcgttgatgacccttgcgatgtgtttggcgtgcacggcgtgtgcggcatcgtcggctgtatcatgaccggtatctttgcagcgaaatcgctgggtggcgtgggctacgcagaaggcgtcaccatggcccatcaggtgctggtgcagctggaaagtattgctgtcaccgtggtgtggtctgccgttgtcgctttcattggctacaaactggcggacatgacggttggtctgcgcgtgccggaagagcaggaacgcgaaggtctggacgtcaacagccacggcgagaatgcgtataacgcatga

SEQ ID NO: 168 - DNA, 1299 bp, Azospirillum lipoferum
  gene (1)..(1299): 16S
  misc_feature (294)..(294): n is a, c, t, g, unknown or other
  misc_feature (299)..(299): n is a, c, t, g, unknown or other
  misc_feature (302)..(302): n is a, c, t, g, unknown or other
  misc_feature (309)..(310): n is a, c, t, g, unknown or other
  misc_feature (332)..(332): n is a, c, t, g, unknown or other
  misc_feature (346)..(346): n is a, c, t, g, unknown or other
  misc_feature (351)..(351): n is a, c, t, g, unknown or other
  misc_feature (438)..(438): n is a, c, t, g, unknown or other
  misc_feature (445)..(445): n is a, c, t, g, unknown or other
  misc_feature (454)..(454): n is a, c, t, g, unknown or other
  misc_feature (469)..(469): n is a, c, t, g, unknown or other
  misc_feature (477)..(477): n is a, c, t, g, unknown or other
  misc_feature (492)..(492): n is a, c, t, g, unknown or other
  misc_feature (504)..(504): n is a, c, t, g, unknown or other
  misc_feature (555)..(555): n is a, c, t, g, unknown or other
  misc_feature (775)..(775): n is a, c, t, g, unknown or other
gccgagagaggggcccgcgtcggattaggtagttggtgaggtaatggctcaccaagccttcgatccgtagctggtctgagaggatgatcagccacactgggactgagacacggcccagactcctacgggaggcagcagtggggaatattggacaatgggcgcaagcctgatccagcaatgccgcgtgagtgatgaaggccttagggttgtaaagctctttcgcacgcgacgatgatgacggtagcgtgagaagaagccccggctaacttcgtgccagcagccgcggtaatacgnagggngcnagcgttnntcggaattactgggcgtaaagngcgcgtaggcggcntgttnagtcagaagtgaaagccccgggctcaacctgggaatagcttttgatactggcaggcttgagttccggagaggatggtggaattcccngtgtagnggtgaaatncgtagatattgggangaacaccngtggcgaaggcggcnatctggacgganactgacgctgaggcgcgaaagcgtggggagcaaacaggattagataccctngtagtccacgccgtaaacgatgaatgctagacgtcggggtgcatgcacttcggtgtcgccgctaacgcattaagcattccgcctggggagtacggccgcaaggttaaaactcaaaggaattgacgggggcccgcacaagcggtggagcatgtggtttaattcgaagcaacgcgcagaaccttaccaacccttgacatgtccactttgggctcgagagatngggtccttcagttcggctgggtggaacacaggtgctgcatggctgtcgtcagctcgtgtcgtgagatgttgggttaagtcccgcaacgagcgcaacccctaccgtcagttgccatcattcagttgggcactctggtggaaccgccggtgacaagccggaggaaggcggggatgacgtcaagtcctcatggcccttatgggttgggctacacacgtgctacaatggcggtgacagtgggaagcgaagtcgcgagatggagcaaatccccaaaagccgtctcagttcggatcgcactctgcaactcgagtgcgtgaagttggaatcgctagtaatcgcggatcagcacgccgcggtgaatacgttcccgggccttgtacacaccgcccgtcacaccatgggagttggttttacccgaaggtggtgcgctaaccgcaaggaggcagccaaccacggtaaggtcagcgactggggtgaagtcgtaacaaggtagccgtaggggaacctgcggctggatcacctccttt

SEQ ID NO: 169 - DNA, 897 bp, Azospirillum lipoferum
  gene (1)..(897): nifH
atggccaaagcgcctctgcgtcagatcgccttttacggcaagggcggtatcggcaagtccaccacctctcagaacacgctggccgcgctggtcgagctggatcagaggatcctgatcgtcggctgcgacccgaaggccgactcgacccgcctgatcctgcacgcaaaggcccaggacaccgtcctgcatctggccgccgaggccggctcggtcgaggatctggagctcgaggacgttctcaagatcggctacaagaacatcaagtgcgtcgagtccggcggtccggagccgggggtcggctgcgccggccgcggcgtcatcacctcgatcaacttcctggaagagaacggcgcctacgacgacgtggactatgtgtcctacgacgtgctgggcgacgtggtctgcggcggcttcgccatgccgatccgcgagaacaaggcccaggaaatctacatcgtcatgtccggcgagatgatggcgctgtacgccgccaacaacatcgccaagggcatcctgaagtacgcgcacagcggcggcgtccgtctcggcggcctgatctgcaacgagcgccagaccgacaaggaatgggatctggccgacgcgctggccaagcgcctgggctccaagctgatccacttcgtgccgcgcgacaacatcgtccagcacgccgagctgcgccgcatgacggtcatcgagtacgccccggacagcaagcaggccggcgaataccgcgcgctcgccaacaagatccatgcgaactccggccagggttgcatcccgaccccgatcaccatggaagagctggaagagatgctgatggacttcggcatcatgaagaccgaggagcagcagctcgccgagctcgccgccaaggaagcggcgaaggccggcgcctga

SEQ ID NO: 170 - DNA, 1440 bp, Azospirillum lipoferum
  gene (1)..(1440): nifD1
atgagcctgtccgagaacaccacggtcgacgtcaagaacctcgtcaacgaagtcctcgaagcctatcccgaaaaatcccgcaagcgccgcgccaagcacctgaacgtgctggaggccgaggccaaggactgcggcgtcaagtcgaacgtcaagtccatccccggcgtcatgaccatccgcggctgcgcctatgccggctccaagggcgtggtgtggggtccgatcaaggacatgatccacatctcccacggtccggtcggctgcggctactactcctggtccggccgccgcaactactacatcggcgacaccggtgtggacagctggggcacgatgcacttcacctccgacttccaggagaaggacatcgtcttcggcggcgacaagaagctgcacaaggtcatcgaggaaatcaacgagctgttcccgctggtgaacggcatctcgatccagtcggaatgcccgatcggcctgatcggcgacgacatcgaggctgtcgcccgcgccaagtcggcggaaatcggcaagccggtcatccccgtgcgctgcgaaggcttccgcggcgtgtcccagtcgctgggccaccacatcgccaacgacgccatccgagactgggtgttcgagaagacggaacccaaggccggcttcgtctccaccccctatgacgtcaccatcatcggcgactacaacatcggcggcgacgcctggtcgtcccgcatcctgctggaggagatcggcctgcgcgtgatcgcccagtggtcgggcgacggcacgctcgccgaactggagaacacgccgaaggccaaggtcaacctgatccactgctaccgctcgatgaactacatcgcgcgccacatggaagagaagttcaacattccttggatggaatacaacttcttcggcccgagccagatcgccgaatccctgcgcaagatcgccgctctcttcgacgacaagatcaaggagaacgccgagaaggtcatcgcccgctaccagccgatggtcgatgcggtcatcgccaagtacaagccgcggctcgaaggcaagaaggtcatgatctacgtcggcggcctgcgtccccgccacgtcgtcgatgcctaccatgacctcggcatggagatcaccggcaccggctacgagttcgcccacaacgacgactatcagcgcacgcagcactacgtgaaggaaggcacgctgatctacgacgacgtcaccgcgttcgaactggagaagttcgtcgaggcgatgcgtcccgacctcgtcgcgtcgggcatcaaggaaaagtacgtgttccagaagatgggcctgccgttccgccagatgcacagctgggactactccggcccgtaccacggctatgacggcttcgcgatcttcgcccgcgacatggacctggccatcaacaaccccgtctggggcgtgatgaaggccccgttctga

SEQ ID NO: 171 - DNA, 1419 bp, Azospirillum lipoferum
  gene (1)..(1419): nifD2
atgctccaggacaagatccaggatgtcttcaacgaaccgggctgcgcgaccaaccaagccaaatcggccaaggagaagaagaagggctgcaccaagtcgctgaaaccgggggcggcagccggcggctgcgcctatgacggggcgatgatcgtgctccagccgatcgccgacgccgcccatctggtccatggccccatcgcctgcctcggaaacagttgggacaaccgcggctccaaatcctccggctcgcagctctaccgcaccggcttcaccaccgatctgtcggaactggacgtcatcggcggcggcgagaagaagctctaccgcgccatcaaggagatcgttcagcaatacgacccgccggccgtcttcgtctatcagacctgcgtgcccgccatgaccggcgacgacatcgccgcggtctgcaagttcgccacgcagaagctgggcaagccggtgatcccggtggactcgccgggcttcgtcgggtcgaagaatctcggcaacaagctggccggcgaagccctgctggagcatgtcatcggcacggtcgaaccggactacaccaccccgaccgacgtctgcatcatcggcgaatacaaccttgccggcgagctgtggctggtcaagccgctgctggacgagatcggcatccgcctcctgtcctgcatttccggcgacggccgctaccgggaggtggcgcaggcccaccgcgcccgcgtcaccatgatggtgtgcagccaggcgctggtgaatgtcgggcgcaagatggaggagcgctacggcatcccctatttcgaggggtccttctacggcgtgtccgacatgtcggacaccctgcgcaccatgacccgcatgctggtggagcgcggcgccgacaagggcctgatcgaccgggcggagggcgtgatcgcgcgggaggaaagccgggtctggcgccggctggaaccctacaagccgcgcttcgacggcaagcgcgtccttctcttcaccggcggcgtcaagagctggtcgatggtcagcgcgctggagggtgcggggctgaccatcctcggcacctccaccaagaaatcgaccagggaggacaaggagcgcatcaagaagatgaagggcgaagagttccaccagtgggacgatttgaagccgcgcgacatctacaggatgctggccgacgatcaggccgacatcatgatgtccggcggccgctcgcagttcatctcgctgaaggccaaggttccctggctcgacatcaaccaggagcgccaccacgcctatgccggctatgacggcatcgtcaatctctgcgaggagatcgacaaaacgctgtcgaatccgatctggcgtcaggtgcgtcagccggcaccgtgggagtccggcgcgtcctccacccttctggcttcctcgatggcggcggagtga

SEQ ID NO: 172 - DNA, 1383 bp, Azospirillum lipoferum
  gene (1)..(1383): nifK
atgtcccacatccagcgcttcccctccgccgccaaggccgcctccaccaacccgctgaagatgagccagccgctgggtgcggctctggcctatctcggcgtcgaccgctgcctgccgctgttccatggctcgcagggctgcaccgccttcgggctggtcctgctggtgcgccatttccgcgaggcgatcccgctccagaccacggcgatggatcaggtcgccaccatcctcggcggctacgacaatctggagcaggcgatccgcaccatcgtcgagcgcaaccagcccgccatgatcggcgtcgccaccaccggcgtcaccgagaccaagggcgaggatatggccggacagtacacgctgttccgccagcgcaaccccgacttggccgacacggccctggtcttcgccaacacccccgacttcgccggcggcttcgaggacggcttcgccgccgcggtcaccgcgatggtcgagcggttggtcgaaccgtcgccggtgcgcatcccgacccaggtcaacgtgctggccggctgccatctgtcccccggcgacgtggaggaactgcgcgacatcatcgaaggcttcggcctgtcgccgatcttcctgcccgacctgtcgctgtcgatggcgggccgccagccggccgacttcaccgccacctcgctgggcggcgtgaccgtcgatcagatccgcgccatgggcgcttcggccctcaccatcgtggtcggtgagcatatgcgggtggccggtaacgcgctggagctgaagaccgacgtgcccagccatttcttcaaccgcctgaccgggctggaggcgacggacaagctggtccggctgctgatggagttgtcgggcaagccggcgcccgcccggctgcggcgccagcgcgaaagcctggtcgatgccatgctcgacgggcatttcttctacagccgcaagcgcatcgccgtcgcgctggagcccgacctgctctatgccgtcaccggcttcctcgccgacatgggggccgaggtgatcgccgcggtgtccccgacgcagagcccggtgctggagcggttgaaggccgccaccatcatggtcggcgatcattccgacgtggagacgctggcccgcgacgccgacctgatcgtctccaactcgcacgggcggcagggagccgcgcggatcggcgtggctctgcaccgcatgggcctgccgctgttcgaccggctgggggccggcctgcgcgtccaggtcggctaccgcggcacgcgggaactgctgtgcgacatcggcaacctgttcctcgcccgcgagatggaccacgagcacgggcacgagagccacgaccacggggaatcccacggctgcggaggcggatcatgcggatgcaacgccgtctga

SEQ ID NO: 173 - DNA, 1560 bp, Azospirillum lipoferum
  gene (1)..(1560): nifK1
atgaccgacaagctttcgcagagcgccgacaaggtcctcgaccactacaccctcttccggcagcccgaatacgcggcgatgttcgagaagaagaagaccgagttcgagtacggccattcggacgaggaagtcgcccgcgtgtccgaatggaccaagtccgaggactacaaggcgaagaacttcgcccgtgaagcggtcgtcatcaacccgaccaaggcctgccagccgatcggcgcaatgttcgccgcccagggcttcgaaggcaccctgcccttcgtccacggctcccagggctgcgtcgcctattaccgcacccacctgacccgtcacttcaaggagccgaacagcgcggtctcctcgtcgatgacggaggacgcggcggtgttcggcggcctgaacaacatgatcgacggcctggcgaacgcctatgcgctctacaagccgaagatgatcgcggtgatgaccacctgcatggccgaagtcatcggcgacgatttgcagggcttcatcgccaatgcgaagaccaaggacagcgtcccggccgacttcccggtcccctacgcccacaccccggccttcgtcggcagccacatcgtcggctacgacaacatgatcaaggggatcctgaccaacttctggggtacgtcggagaatttcgacacacccaagaccgagcagatcaacctgatcccgggcttcgacggcttcgccgtcggcaacaaccgcgaactgaagcgcatcgccggcgaattcggcgtgaagctgcaaatcctgtccgacgtgtccgacaatttcgacacgccgatggatggcgagtaccgcatgtatgacggcggcaccaccatcgaggagaccaaggaggccctgcacgccaaggccaccatctccatgcaggagtacaacacgacccagaccctgcaattctgcaaggagaagggtcaggaagtcgccaagttcaactacccgatgggcgtcaccggcaccgacgagctgctgctgaagctcgccgaactgtcgggcaagccggtcccggccagcctgaagctggagcgcggccgtctggtcgacgccatcgccgacagccacacccacatgcacggcaagcgcttcgccgtctatggcgacccggacttctgcctgggcatgtccaagttcctgctggagctgggtgcggagccggtgcacatcctgtcgacgtcgggctccaagaagtgggagaagcaggtccagaaggtgctggacggctcgcccttcggcgcctcgggcaaggcccatggcggcaaggatctgtggcacctgcgttcgctgatcttcaccgacaaggtggactacatcatcggcaacagctacggcaagtatctggagcgcgacaccaaggttccgctgatccgcctgacctacccgatcttcgaccgccaccaccaccaccgctacccgacctggggctaccagggcgcgctgaacgtgctggtacggatcctggaccggatcttcgaggacatcgacgccaacaccaacatcgtcggccagaccgactactcgttcgacctgatccgctga

SEQ ID NO: 174 - DNA, 1530 bp, Azospirillum lipoferum
  gene (1)..(1530): nifA
atgttgacctctgatattgttggcaaattgcgctgcatcgcagcagaccccaaagcgggcatcgcaaggggcctcgacaccgggacgacgaagatcggtcccgtttgggagggtgacgtgggcgacaccgtggatttcgaagcgctgcgccagcgggcggtccactccctgttcgaacatctggaatccatgtgcgtcggcgccgtcgccgtcgaccacaccggccgcatcgcctggatggacgagaagtacaaggctctgctgggcgttcccgacgacccgcgcggccggcaggtggaggacgtcatccccaacagccagctgcgccgggtgatcgacagcggccagccgcagccgctggacatcatggagttcgacgaccggtccttcgtggtgacgcggatgccgctgttcggcaccgacggttcgatcatcggcgccatcggcttcgtgctgttcgaccgcgccgaatatctccgcccgctggtccgcaaatacgagaagatgcaggaggagctggcccgcacccagcaggagctggcgcatgagcgccgcgccaaatactccttctcgcagttcctgggcgccagcgaatcgatccgcgagatcaagcggctggggcgccgcgccgcccagatggattcgaccgtcctgctgctgggcgaaaccgggaccggcaaggagctgctggcccaggccatccattccgccagcccgcgggcgtccaagcccttcgtcggcgtcaatgtcgccgccattccggaaaccctgctggaggcggagttcttcggcgtcgcccccggcgccttcaccggcgccgaccgccgccaccgcgacggcaagttccagctcgccaacggcggcaccctgttcctcgacgagatcggcgacatgccgctgccggtgcaggccaagcttctgcgcgtgctgcaggagcgggagatcgagccgctcggctccaacaaggtggtgcgggtcgatgtccgcatcatcgccgccaccagccgtgacctgcacgccctggtgcgtgagaagcagttccgcgccgacctctattaccggctgaatgtggtgccgatcaccctgccgccgctgcgcgaccggccggaggacatcgagagcatcgccgaccgcatcctggaacagctggcgatccagcagggcacgccgccgcgcgagctgctggaatcggcggtgcaggtgctgcgcgactatgactggcccggcaatgtgcgcgagctttacaacacgctggaacgggtggtggcgctgaccgatgcgccgatcctgaccgcgccgcacatccgcagcgtgctgcccggccagcatccggccggcgcgtcggccctgccgctggcggccggcgcgcggccgttgcaggaggtgctgcacgccgccgagcgccacgccatcgccgcggcgcttgaggaggcgaacggcgtcaaggcgcgggcggcgaagctgctgggcatttcgcgcgcgtcgctgtacgaacgcatggtgacgctggggttgggggcgacgcagtag

SEQ ID NO: 175 - DNA, 3030 bp, Azospirillum lipoferum
  gene (1)..(3030): glnE
atgccgagtcccatcgcgttctcaagccccttgccgaagcctttcgacagcgcgcaggcggcgctggggatggagcgctggcgccagcaggccgccgcggcggagccggagacccgcgcctgggcggaagccttcgccgattcggagaccggccgggcgctgatcggggcggtgtgcggcaacagcccgtatctcggccacagcctgacgcgggagttgcccttcgtcgcccgtacagtgcaggacggcttcgacgacaccttcgccgcgctgatcgccgctctccatgccgagcatggcgaggagaaatcgatggaccggctgatggccggcctgcgggtggcgaagcggcgggcggcgctgctgatcgcgctggccgacatcgccggcgcgtggccgctgttccgcgtcaccggcgccctgtcggagctggcggagacgggggtgcagctggccgcgaatttcctgctgcgccgcgccagggaggcggggacgctgacgctgccggatccgcagcgaccgtgggtcggttcgggcctgatcgttttgggcatgggtaagcttggcgggcgcgaactcaactattccagcgacatcgacctgatcgtcctgtatgacgacgctgttgtgcagacgccccagccggacaacctcgcgcgaaccttcatcaggctcgcacgcgatcttgtccgcattatggatgaacggaccaaggacggctacgtcttccgcaccgaccttcggcttaggcccgatcccggcgccacgccgctggcggtttccgtctccgcagccgaaatttattacggcagcgtcggtcagaactgggaacgcgcggcgatgatcaaggcccgtcccatcgccggcgatctggaggcgggcgcctcctttgtccgcttcctggagcccttcgtctggcgccgcaacctggatttcgccgccatccaggacatccattcgatcaaacgccagatcaacgcccacaagggccaccgcgaggtgacggtcaacggccacgacatcaaggtcggccgcggcggcatccgcgagatcgagttcttcgcccagacccagcagctgatcttcggcgggcgcgacccgcgcgtgcgaatcgctccgaccctgatggcgaacgaggcgctgcgcgacgtcggccgcgtgccgccgcagacggtggaagagcttgccggggcctatcatttcctgcgccgtgtcgaacatcgcatccagatgatcgacgaccagcagacccatcgtattcccgccgacgatgccggggtggcgcatttggccaccttcctcggctatgacgaccccgccgccttccgggcggaactgctggcgacgctggggcaggtggaggaccgctatgccgagctgttcgaggaggcgccgtcgctttccggccccggcaatctggtcttcaccggcaccgaccccgatccgggcacgatggagacgctgaagggcatgggcttcgccgatccggcccgcgtcatcagcgtggtgtcggcctggcatcgcggccgctaccgcgccacccggtcgggccgggcgcgggagctgctgacggagctgacgccggccctgctgagtgcgctgaccaagaccccggcccccgattcggcgctgatgaacttcgacgatttcctcggcaagctgccggccggcgtcggtctgttctcgctgttcgtcgccaatccctggctcctggagctggtggcggagatcatgggcatcgcgccgcagatggcgcagacgctgtcgcgcaacccgtcgctgctcgacgccgtgctgtcgccggacttcttcgacccgctgccgggcaaggaggacgggctggccgacgaccacgcccgcgtgatggcgccggcccgcgatttcgaggatgcgctgaccctgtcgcggcgctggaccaacgaccagcgcttccgcgccggggtgcatatcctgcgcggcatcaccgatggcgaccgctgcggcgccttcctggccgatctggccgacatcgtcgtccccgaccttgcccgccgggtggaggaggagttcgcccagcgccacggccatattcccggcggcgcctgggtggtggtggcgatgggcaagctcggcagccggcagctgaccatcacgtccgacatcgacctgatcgtcatctacgatgtggcgccgggccaagggggcgggggcggtccccgcttgtcggatggtgccaagccgctgtcgcccaacgagtattacatcaagctgactcagcgtctgaccaacgccattaccgcgccgatgggcgacggccggctctacgaggtcgacatgcggctgcgcccgtcgggcaacgccgggccgctcgccacctcgctggacgctttcctgaaatatcaggcgaccgatgcctggacctgggagcatatggccctgacccgcgcccgggtgatcggcggtgatgcggagctggccgggcgggtgtcggcagcgatccgctcggtgctgacggcgccgcgcgatgccgaccggctgctgtgggacgtggccgacatgcggcggcggatcgagaaggagttcgggacgaccaatgtctggaacgtcaaatacgcccgcggcggcctgatcgacatcgagttcatcgcccagtacctgcaactgcgccatggtcacgagcggccggacatcctgcacatcggcaccgccaaggcgctgggctgcgccgcccggacgggcgcgctggcgccggaggtggcggaggatctggagacgacgctgcggctgtggcggcgggtgcagggctttctgcggttgaccaccgccggggtgctcgatcccaatcaggtgtcgcccagcctgctggccgggctggtccgcgccgcctttcctgctgactttcagggcgagcgtgagcctggcactgttgacttccccgaactggaccacaaaatccgtgccgtcgccgcccgcgcccatggtcatttcaagaccctggtcgaggaaccggcgggccgtctggccccacccgccaccacgcctccagcctga

SEQ ID NO: 176 - DNA, 1440 bp, Azospirillum lipoferum
  gene (1)..(1440): amtB1
atgaaccgtctgttccttatggccgcaccgatgatggcggttgctctgggcgcggtcggcatgccggccgcagcccttgcccaggatccggcggctgccgccgctgccgcggctgcggctgcggctgccgccgctgctgccgcaccggcggctccggcgctgaatggcggcgacaccgcctggatgctcatctccaccgcgctggtgctgatgatgaccatccccggcctggcgctgttctacggcggcatggtccgcaagatgaacgtgctgtcgacggtgatgcagagcttcgccatcacctgcctgatcagcgtcctgtggtacgtcatcggctacagcctggccttcaccggcaccggtgcctatgtcggcggtctcgaccggctgttcctcaacgggctcgacttcacgaaggccttcgtgctgggcgaggcgaccgggtcgggcgtcccgacgaccatccccgagccggtcttcatgatgttccagatgacctttgcgatcatcaccccggccctgatcaccggcgccttcgccgaccgcatgaagttctcctccctgctggtcttcaccgcgctgtggtcgatcgtggtctatgcgccgatcgcccactgggtctggtacccgtcgggcttcctgttcggcctgggcgtgctggacttcgccggcggcacggtcgtgcacatcaacgccggcgtcgccggcctggtcgccgcgctggtgatcggcaagcgcaagggctacccgaaggaagccttcatgccgcacaacctggtgctgtcgctgatcggcgcctcgctgctgtgggtcggctggttcggcttcaacgccggttcggccctgaccgccggtccgcgtgccggcatggcgctggccgccacgcacatcgccaccgccggtgccgccatgggctggctgttcgcggagtggatcgtcaagggcaagccgtcgatcctcggcatcatctccggcgccgtcgccggcctggtcgcggtgaccccggccgccggcttcgtcgacccgacgggcgccatcgtcatcggcatcgtcgccggcgtggtctgcttctggtcggccaccagcctcaagcacatgctgggctatgacgacagcctggacgccttcggcgtgcacggcgtcggcggcctgatcggcgccatcctgaccggcgtcttcgccaagatgtcggtgtccaacagcgaaggcggcttcgcctccgtcctgcaggccgacccgaaggccacgctgggcctgctggaaggcaacgccgccgccgtctggatccaggtccagggcgtcctctacaccatggtctggtgcgccatcgccaccttcgtcctgctgaagatcgtcgatgtggtcatgggcctgcgcgtcgaagaggatgtggagcgcgacggtctcgacctcgccctgcatggcgagagcatccactaa

SEQ ID NO: 177 - DNA, 1227 bp, Azospirillum lipoferum
  gene (1)..(1227): amtB2
atggatgcggcaaagacgggtggcgacgtccttttcgtgctgatgggcgcggtgatggtgctggcgatgcattgcggcttcgccctgctggaggtcgggacggtccggcgcaagaatcaggtcaacgcgctggtgaagatcctgtcggacttcgccatgtcgaccatcgcctattttttcgtcggttatgccgtggcctacggcatcgacttcttcgccgacgcccacacgctggtcggcaagggaagcggcgggttcgcggcctatggctacgatctggtgaagttcttcttcctggcgaccttcgccgccgcggtgccggccatcgtctcgggcggcatcgccgagcgtgctaggttctggccgcaggccgccgccacgctggcgctgatcgcgctgttctatccattgctggaaggcacggtctggggcacccgcttcggcctgcaaagctggatggccgcgaccttcggccagcctttccacgacttcgccggatctgtggtggtgcatgccttcggcggctgggtggcgctgggtgccgtgctgaacctcggcaaccgccgcggccgctaccgtccgaacggctcgctgatcgccattccgccgtcgaacatccccttcctggcgctgggcgcctgggtgctgtgcgtggggtggttcggcttcaacgtgatgagcgcccaggtgctggatggcgtgacgggtctggtggcgctgaactcgctgatggcgatggtcggcggcatcgtcacctcgctggtgatcagccgcaccgatcccggcttcgtccacaacggcgcgctggccggtctggtggcggtctgcgccgggtccgacgtgatgcacccgctgggcgcgctggtcaccggcggcatcgccgggctgctgttcgtctgggccttcaacaaatgccagatcgactggaagatcgacgacgtgctgggcgtctggccgctgcacggtctgtgcggcctgaccggcggcctgctggccggcgtcttcgggcaggaggcactgggcggccttggcggcgtgtcgatcctcagccagatcgtcggcacggcaagcggcgccagcttcggattcgtctcgggtctggcggtctacggcctgctgcgcgtcaccgtcggcatccgcctcgatcccgagcaggagtacaagggcgccgacttgtcgttgcaccatatcaccgcgtacccggaagaggacgcgccgaccctgtaa

SEQ ID NO: 178 - DNA, 613 bp, Artificial Sequence
  Synthetic polynucleotide
  misc_feature (1)..(613): delta-nifL::PinfC
atgaccctgaatatgatgatggattcttggttctctggagcgctttatcggcatcctgactgaagaatttgcaggcttcttcccaacctggcttgcacccgtgcaggtagttgtgatgaacatcactgattcgcaggctgaatacgttaacgaattgacccgtaaactgcaaaatgcgggcattcgtgtaaaagcagacttgagaaacgagaagattggctttaaaatccgcgagcacactttacgtcgtgtcccttatatgctggtttgtggtgacaaagaggtcgaagccggcaaagttgctgtgcgtacccgtcgcggtaaagacctgggtagcctggacgtaaatgatgttatcgagaagctgcaacaagagattcgcagccgcagtcttcaacaactggaggaataaggtattaaaggcggaaaacgagttcaaacggcgcgtcccaatcgtattaatggcgagattcgcgccacggaagttcgcttaacaggtctggaaggcgagcagcttggtattgcgatagaactcacttcacgccccgaagggggaagctgcctgaccctacgattcccgctatttcattcactgaccggaggttcaaaatga

SEQ ID NO: 179 - DNA, 1613 bp, Artificial Sequence
  Synthetic polynucleotide
  misc_feature (1)..(1613): delta-nifL::PinfC with 500bp flank
accggataagagagaaaagtgtcgacgtcggtccggttgatattgaccggcgcatccgccagctcgcccagtttttggtggatctgtttggcgattttgcgggtcttgccggtgtcggtgccgaaaaaaataccaatatttgccataacacacgctcctgttgaaaaagagatcccgcggggaaaatgcggtgaacatgtcagctattgcgaagagtgtgccagttttgctcacgggcaaaagctgcaccagaatgggtattaatgcaccagcctggcgctttttttcgcggcacgtcccctcgctaatgcccgtctggcgcggctttgacgctgataaggcgctgaataccgatctggatcaaggttttgtcgggttatcgtccaaaaggtgcactctttgcatggttataagtgcctgacatggtgtccgggcgaacgtcgccaggtggcacaaattgtcagaactacgacacgactaaccgaccgcaggagtgtgcgatgaccctgaatatgatgatggattcttggttctctggagcgctttatcggcatcctgactgaagaatttgcaggcttcttcccaacctggcttgcacccgtgcaggtagttgtgatgaacatcactgattcgcaggctgaatacgttaacgaattgacccgtaaactgcaaaatgcgggcattcgtgtaaaagcagacttgagaaacgagaagattggctttaaaatccgcgagcacactttacgtcgtgtcccttatatgctggtttgtggtgacaaagaggtcgaagccggcaaagttgctgtgcgtacccgtcgcggtaaagacctgggtagcctggacgtaaatgatgttatcgagaagctgcaacaagagattcgcagccgcagtcttcaacaactggaggaataaggtattaaaggcggaaaacgagttcaaacggcgcgtcccaatcgtattaatggcgagattcgcgccacggaagttcgcttaacaggtctggaaggcgagcagcttggtattgcgatagaactcacttcacgccccgaagggggaagctgcctgaccctacgattcccgctatttcattcactgaccggaggttcaaaatgacccagcgaaccgagtcgggtaataccgtctggcgcttcgatttatcccagcagttcaccgcgatgcagcggataagcgtggttctcagccgggcgaccgaggttgaacagacactccagcaggtgctgtgcgtattgcacaatgacgcctttttgcagcacggcatgatctgtctgtacgacagccagcaggcgattttgactattgaagcgttgcaggaagccgatcagcagttgatccccggcagctcgcaaattcgctaccgtccgggtgaagggctggtcgggacggtgctttcgcaggggcaatcgttagtgctggcgcgtgtggctgacgatcagcgctttcttgaccgcctgggactgtatgattacaacctgccgtttatcgccgtgccgctgatagggccggatgcgcagacttttggcgtgctgacggcgcaaccgatggcgcgttacgaagagcggttacccgcctgcacccgctttctggaaacggtc

SEQ ID NO: 180 - DNA, 1185 bp, Artificial Sequence
  Synthetic polynucleotide
  misc_feature (1)..(1185): glnE-delta-AR-2
tccctgtgcgccgcgtcgccgatggtggccagccaactggcgcgctacccgatcctgctcgatgaactgctcgacccgaacacgctctatcaaccgacggcgatgaacgcctatcgcgatgaactgcgacaatacctgttgcgcgtgccggaagaggatgaagagcagcaactggaggcgctacggcagtttaagcaggcgcagttgttgcgcgtagcggcggcggatatcgccggtacgttacccgtcatgaaagtgagcgatcacttaacctggctggcggaagcgattatcgatgcggtggtgcagcaagcctggaaccagatggtggcgcgttacggccagccgacgcatctgcacgatcgcgaagggcgcggtttcgccgtggtcggttacggcaaacttggcggctgggaattaggttacagctccgatctggatctggtgttcctgcacgactgccccatggatgtgatgaccgatggcgagcgtgaaatcgatggccgccagttctatttgcgcctcgcgcagcgcgtgatgcacctgttcagcacgcgcacgtcgtccggcattctttatgaagtcgatgcgcgtttgcgcccgtccggcgcggccggaatgctggtgaccactgcggaagcgttcgccgattatcaaaaaaatgaagcctggacatgggagcatcaggcgctggcgcgtgcgcgcgtggtgtacggcgatccgcaactgaccgccgaatttgacgccattcgccgcgatatcctgatgacctcccgcgatgccgctaccctgcaaaccgaagtgcgggaaatgcgtgagaaaatgcgcgcccatcttggtaacaagcacaaagaccgtttcgatctgaaagccgatgaaggcggtatcaccgatattgagtttatcgctcagtatctggtgctgcgctttgcccatgagaagccgaaactgacgcgctggtcggataatgtgcgcatcctcgaagggctggcgcaaaacggcatcatggatgagcaggaagcgcaggcattgacgctggcgtacaccacgttgcgtgatgagctgcaccacctggcgctgcaagagctgccaggacatgtggcgctctcctgttttgtcgccgagcgtgcgcttatcaaaaccagctgggacaagtggctggtggaaccgtgcgccccggcgtaa

SEQ ID NO: 181 - DNA, 2085 bp, Artificial Sequence
  Synthetic polynucleotide
  misc_feature (1)..(2085): glnE-delta-AR-2 with 500bp flank
taaagcgagcgctcacttacgtgatctgttgacgcagtccgaagcgaccattacttcagccgtttcagcagatacggcggtgtggagtgcgcaatcagccctggcgaaactggtgctcaccgagtggttagtgacgcagggctggcgaaccttccttgatgaaaaagcgcaggctaagtttgccgactcctttaaacgctttgctgacgttcatctgtcacgcagcgccgccgagctgaaaaaagcctttgcccagccgctgggcgacagctatcgcgaccagttaccgcggctggcgcgtgatatcgacagcgcgttattgctggccggacattacgatcgcgcgcgcgccgtggagtggctggaaaactggcaggggcttcagcacgctattgaaacgcgccagagagttgaaatcgaacatttccgtaataccgccattacccaggagccgttctggttgcacagcggaaaacgttaacgaaaggatatttcgcatgtccctgtgcgccgcgtcgccgatggtggccagccaactggcgcgctacccgatcctgctcgatgaactgctcgacccgaacacgctctatcaaccgacggcgatgaacgcctatcgcgatgaactgcgacaatacctgttgcgcgtgccggaagaggatgaagagcagcaactggaggcgctacggcagtttaagcaggcgcagttgttgcgcgtagcggcggcggatatcgccggtacgttacccgtcatgaaagtgagcgatcacttaacctggctggcggaagcgattatcgatgcggtggtgcagcaagcctggaaccagatggtggcgcgttacggccagccgacgcatctgcacgatcgcgaagggcgcggtttcgccgtggtcggttacggcaaacttggcggctgggaattaggttacagctccgatctggatctggtgttcctgcacgactgccccatggatgtgatgaccgatggcgagcgtgaaatcgatggccgccagttctatttgcgcctcgcgcagcgcgtgatgcacctgttcagcacgcgcacgtcgtccggcattctttatgaagtcgatgcgcgtttgcgcccgtccggcgcggccggaatgctggtgaccactgcggaagcgttcgccgattatcaaaaaaatgaagcctggacatgggagcatcaggcgctggcgcgtgcgcgcgtggtgtacggcgatccgcaactgaccgccgaatttgacgccattcgccgcgatatcctgatgacctcccgcgatgccgctaccctgcaaaccgaagtgcgggaaatgcgtgagaaaatgcgcgcccatcttggtaacaagcacaaagaccgtttcgatctgaaagccgatgaaggcggtatcaccgatattgagtttatcgctcagtatctggtgctgcgctttgcccatgagaagccgaaactgacgcgctggtcggataatgtgcgcatcctcgaagggctggcgcaaaacggcatcatggatgagcaggaagcgcaggcattgacgctggcgtacaccacgttgcgtgatgagctgcaccacctggcgctgcaagagctgccaggacatgtggcgctctcctgttttgtcgccgagcgtgcgcttatcaaaaccagctgggacaagtggctggtggaaccgtgcgccccggcgtaagtgtggtatcatcgcgcgcaaattttgtatctctcaggagacaggaatgaaagttacgctgccagagttcaatcaagccggtgtcatggtggtgggtgatgtgatgctggatcgctactggtacggcccaaccagccgcatttctccggaagcgccagttccggttgttaaagtcgatactattgaagagcgaccgggcggtgcggcaaacgtggcgatgaacattgcctcgctgggcgcaacggcgcgtctggttggcctgactggcattgatgatgcggcgcgcgcgctgagcaaagcgctggcggatgttaatgttaaatgtgacttcgtttctgttccgactcaccccaccatcactaagctgcgcgtgctgtcgcgtaaccagcaactgattcgc

SEQ ID NO: 182 - DNA, 461 bp, Artificial Sequence
  Synthetic polynucleotide
  misc_feature (1)..(461): delta-nifL::Prm1
atgaccctgaatatgatgatggatgccagccgttctgtaataataaccggacaattcggactgattaaaaaagcgccctcgcggcgctttttttatattctcgactccatttaaaataaaaaatccaatcggatttcactatttaaactggccattatctaagatgaatccgatggaagctcgctgttttaacacgcgttttttaaccttttattgaaagtcggtgcttctttgagcgaacgatcaaatttaagtggattcccatcaaaaaaatattctcaacctaaaaaagtttgtgtaatacttgtaacgctacatggagattaactcaatctagagggtattaataatgaatcgtactaaactggtactgggcgcaactcacttcacgccccgaagggggaagctgcctgaccctacgattcccgctatttcattcactgaccggaggttcaaaatga

SEQ ID NO: 183 - DNA, 1461 bp, Artificial Sequence
  Synthetic polynucleotide
  misc_feature (1)..(1461): delta-nifL::Prm1 with 500bp flank
accggataagagagaaaagtgtcgacgtcggtccggttgatattgaccggcgcatccgccagctcgcccagtttttggtggatctgtttggcgattttgcgggtcttgccggtgtcggtgccgaaaaaaataccaatatttgccataacacacgctcctgttgaaaaagagatcccgcggggaaaatgcggtgaacatgtcagctattgcgaagagtgtgccagttttgctcacgggcaaaagctgcaccagaatgggtattaatgcaccagcctggcgctttttttcgcggcacgtcccctcgctaatgcccgtctggcgcggctttgacgctgataaggcgctgaataccgatctggatcaaggttttgtcgggttatcgtccaaaaggtgcactctttgcatggttataagtgcctgacatggtgtccgggcgaacgtcgccaggtggcacaaattgtcagaactacgacacgactaaccgaccgcaggagtgtgcgatgaccctgaatatgatgatggatgccagccgttctgtaataataaccggacaattcggactgattaaaaaagcgccctcgcggcgctttttttatattctcgactccatttaaaataaaaaatccaatcggatttcactatttaaactggccattatctaagatgaatccgatggaagctcgctgttttaacacgcgttttttaaccttttattgaaagtcggtgcttctttgagcgaacgatcaaatttaagtggattcccatcaaaaaaatattctcaacctaaaaaagtttgtgtaatacttgtaacgctacatggagattaactcaatctagagggtattaataatgaatcgtactaaactggtactgggcgcaactcacttcacgccccgaagggggaagctgcctgaccctacgattcccgctatttcattcactgaccggaggttcaaaatgacccagcgaaccgagtcgggtaataccgtctggcgcttcgatttatcccagcagttcaccgcgatgcagcggataagcgtggttctcagccgggcgaccgaggttgaacagacactccagcaggtgctgtgcgtattgcacaatgacgcctttttgcagcacggcatgatctgtctgtacgacagccagcaggcgattttgactattgaagcgttgcaggaagccgatcagcagttgatccccggcagctcgcaaattcgctaccgtccgggtgaagggctggtcgggacggtgctttcgcaggggcaatcgttagtgctggcgcgtgtggctgacgatcagcgctttcttgaccgcctgggactgtatgattacaacctgccgtttatcgccgtgccgctgatagggccggatgcgcagacttttggcgtgctgacggcgcaaccgatggcgcgttacgaagagcggttacccgcctgcacccgctttctggaaacggtc

SEQ ID NO: 184 - DNA, 1185 bp, Artificial Sequence; identical to SEQ ID NO: 180
  Synthetic polynucleotide
  misc_feature (1)..(1185): glnE-delta-AR-2

SEQ ID NO: 185 - DNA, 2085 bp, Artificial Sequence; identical to SEQ ID NO: 181
  Synthetic polynucleotide
  misc_feature (1)..(2085): glnE-delta-AR-2 with 500bp flank

SEQ ID NO: 186 - DNA, 461 bp, Artificial Sequence; identical to SEQ ID NO: 182
  Synthetic polynucleotide
  misc_feature (1)..(461): delta-nifL::Prm1

SEQ ID NO: 187 - DNA, 1461 bp, Artificial Sequence; identical to SEQ ID NO: 183
  Synthetic polynucleotide
  misc_feature (1)..(1461): delta-nifL::Prm1 with 500bp flank

SEQ ID NO: 188 - DNA, 1185 bp, Artificial Sequence; identical to SEQ ID NO: 180
  Synthetic polynucleotide
  misc_feature (1)..(1185): glnE-delta-AR-2

SEQ ID NO: 189 - DNA, 2085 bp, Artificial Sequence; identical to SEQ ID NO: 181
  Synthetic polynucleotide
  misc_feature (1)..(2085): glnE-delta-AR-2 with 500bp flank

SEQ ID NO: 190 - DNA, 452 bp, Artificial Sequence
  Synthetic polynucleotide
  misc_feature (1)..(452): delta-nifL::Prm7
atgaccctgaatatgatgatggatgccagccgcgtcaggttgaacgtaaaaaagtcggtctgcgcaaagcacgtcgtcgtccgcagttctccaaacgttaattggtttctgcttcggcagaacgattggcgaaaaaacccggtgcgaaccgggtttttttatggataaagatcgtgttatccacagcaatccattgattatctcttctttttcagcatttccagaatcccctcaccacaaagcccgcaaaatctggtaaactatcatccaattttctgcccaaatggctgggattgttcattttttgtttgccttacaacgagagtgacagtacgcgcgggtagttaactcaacatctgaccggtcgataactcacttcacgccccgaagggggaagctgcctgaccctacgattcccgctatttcattcactgaccggaggttcaaaatga

SEQ ID NO: 191 - DNA, 1451 bp, Artificial Sequence
  Synthetic polynucleotide
  misc_feature (1)..(1451): delta-nifL::Prm7 with 500bp flank
accggataagagagaaaagtgtcgacgtcggtccggttgatattgaccggcgcatccgccagctcgcccagtttttggtggatctgtttggcgattttgcgggtcttgccggtgtcggtgccgaaaaaaataccaatatttgccataacacacgctcctgttgaaaaagagatcccgcggggaaaatgcggtgaacatgtcagctattgcgaagagtgtgccagttttgctcacgggcaaaagctgcaccagaatgggtattaatgcaccagcctggcgctttttttcgcggcacgtcccctcgctaatgcccgtctggcgcggctttgacgctgataaggcgctgaataccgatctggatcaaggttttgtcgggttatcgtccaaaaggtgcactctttgcatggttataagtgcctgacatggtgtccgggcgaacgtcgccaggtggcacaaattgtcagaactacgacacgactaaccgaccgcaggagtgtgcgatgaccctgaatatgatgatggatgccagccgcgtcaggttgaacgtaaaaaagtcggtctgcgcaaagcacgtcgtcgtccgcagttctccaaacgttaattggtttctgcttcggcagaacgattggcgaaaaaacccggtgcgaaccgggtttttttatggataaagatcgtgttatccacagcaatccattgattatctcttctttttcagcatttccagaatcccctcaccacaaagcccgcaaaatctggtaaactatcatccaattttctgcccaaatggctgggattgttcattttttgtttgccttacaacgagagtgacagtacgcgcgggtagttaactcaacatctgaccggtcgataactcacttcacgccccgaagggggaagctgcctgaccctacgattcccgctatttcattcactgaccggaggttcaaaatgacccagcgaaccgagtcgggtaataccgtctggcgcttcgatttatcccagcagttcaccgcgatgcagcggataagcgtggttctcagccgggcgaccgaggttgaacagacactccagcaggtgctgtgcgtattgcacaatgacgcctttttgcagcacggcatgatctgtctgtacgacagccagcaggcgattttgactattgaagcgttgcaggaagccgatcagcagttgatccccggcagctcgcaaattcgctaccgtccgggtgaagggctggtcgggacggtgctttcgcaggggcaatcgttagtgctggcgcgtgtggctgacgatcagcgctttcttgaccgcctgggactgtatgattacaacctgccgtttatcgccgtgccgctgatagggccggatgcgcagacttttggcgtgctgacggcgcaaccgatggcgcgttacgaagagcggttacccgcctgcacccgctttctggaaacggt

SEQ ID NO: 192 - DNA, 1191 bp, Artificial Sequence
  Synthetic polynucleotide
  misc_feature (1)..(1191): glnE-delta-AR-2
atggcgctgaagcacctgatcacgctctgcgcggcgtcgccgatggtcgccagccagctggcgcgccacccgctgctgctggatgagctgctggatcccaacaccctctatcagccgacggcgaccgatgcctatcgcgacgagctgcgccagtacctgctgcgcgtgccggaagaggatgaagagcagcagctggaggcgttgcgccagtttaagcaggcgcagcagctgcatatcgcggcggcggatatcgctggtaccctgccggtgatgaaggtcagcgatcacttaacctggcttgccgaagcgatcctcgacgcggtggtgcagcaggcatgggggcagatggtcgctcgctacggccagccgacccacctgcacgatcgccagggtcgcggcttcgccgtcgtcggctacggtaagcttggcggctgggagctgggctacagctccgatctcgatctggtgttcctccatgactgcccggcggaggtgatgaccgacggcgagcgggagattgacggccgtcagttctacctgcggctggcccagcggatcatgcacctgttcagcacccgcacctcgtccggtattctctacgaagtggacgcccggctgcgtccttctggcgcggcggggatgctggtcaccaccgccgacgcgtttgctgactatcagcagaacgaagcctggacgtgggaacatcaggcgctggtgcgcgcccgcgtggtctatggcgacccggcgctgcaggcgcgctttgacgccattcgtcgcgatatcctgaccaccccgcgggaggggatgaccctgcagaccgaggttcgcgagatgcgcgagaagatgcgcgcccaccttggcaacaaacatcccgatcgttttgatatcaaagccgatgccggcgggatcaccgatattgaatttattactcagtatctggtcctacgctatgccagtgacaagccgaagctgacccgctggtctgacaacgtgcgtattcttgagctgctggcgcagaacgacatcatggacgaggaggaggcgcgcgccttaacgcatgcgtacaccaccttgcgtgatgcgctccatcacctggccctgcaggagcagccgggacacgtggcgccagaggccttcagccgggagcgtcagcaggtcagcgccagctggcagaagtggctgatggcttaa

SEQ ID NO: 193 - DNA, 2191 bp, Artificial Sequence
  Synthetic polynucleotide
  misc_feature (1)..(2191): glnE-delta-AR-2 with 500bp flank
cgtaaggcgaccacccagctccgcgcgttgctgaacgacgctgaagccgttctgctggccgcggacaccgccgacgaggcgttattccgcaccgaggtcgtcggcgccaaactggccctgactgaatggctggtccagcgcggctggcgtccgttcctcaacgaggcaggagagaaaaaaatagccggatcgttcaaacggtttgccgatattaacctctcgcgggtggcggccgagctgcgcagcgccgtgcagcatctggcggttgaagatgccgccgaccagttgccgaagctgtcccgcgacatcgacagcgtccagctgctggcgggcgcctatggcgacgccgtcgcgccgtggctggagaactggcaggagcttcaccgtgcaatagcacatgacgatcgcagcgtctttgaatatttccgtcgccaggcgctggctgccgagccgttctggctgcatagtggaaaacgataatttcaggccagggagcccttatggcgctgaagcacctgatcacgctctgcgcggcgtcgccgatggtcgccagccagctggcgcgccacccgctgctgctggatgagctgctggatcccaacaccctctatcagccgacggcgaccgatgcctatcgcgacgagctgcgccagtacctgctgcgcgtgccggaagaggatgaagagcagcagctggaggcgttgcgccagtttaagcaggcgcagcagctgcatatcgcggcggcggatatcgctggtaccctgccggtgatgaaggtcagcgatcacttaacctggcttgccgaagcgatcctcgacgcggtggtgcagcaggcatgggggcagatggtcgctcgctacggccagccgacccacctgcacgatcgccagggtcgcggcttcgccgtcgtcggctacggtaagcttggcggctgggagctgggctacagctccgatctcgatctggtgttcctccatgactgcccggcggaggtgatgaccgacggcgagcgggagattgacggccgtcagttctacctgcggctggcccagcggatcatgcacctgttcagcacccgcacctcgtccggtattctctacgaagtggacgcccggctgcgtccttctggcgcggcggggatgctggtcaccaccgccgacgcgtttgctgactatcagcagaacgaagcctggacgtgggaacatcaggcgctggtgcgcgcccgcgtggtctatggcgacccggcgctgcaggcgcgctttgacgccattcgtcgcgatatcctgaccaccccgcgggaggggatgaccctgcagaccgaggttcgcgagatgcgcgagaagatgcgcgcccaccttggcaacaaacatcccgatcgttttgatatcaaagccgatgccggcgggatcaccgatattgaatttattactcagtatctggtcctacgctatgccagtgacaagccgaagctgacccgctggtctgacaacgtgcgtattcttgagctgctggcgcagaacgacatcatggacgaggaggaggcgcgcgccttaacgcatgcgtacaccaccttgcgtgatgcgctccatcacctggccctgcaggagcagccgggacacgtggcgccagaggccttcagccgggagcgtcagcaggtcagcgccagctggcagaagtggctgatggcttaactataaaatcgggtgtgctattatcgcgcgcaaagtttgcgtctcgcaggagagagtcatgaaagtaacgctgccggagtttgaacgtgcaggagtgttggtggtgggtgatgtgatgctggaccgctactggtacggccccaccagtcgtatttccccggaagccccggtgccggtggtgaaggtggaaaatatcgaagaacgtcctggcggcgcggcaaacgtagcgatgaacatcgcctccctgggggcaacgtcgcgcctggtgggattgaccgggattgatgacgctgcccgcgcgctgagccaggcgctggccaatgtgaatgtgaagtgcgacttcgtctccgtcccgactcacccgaccatcaccaagctgcgggtgctgtcgcgcaatcagcagctgatccgcctcgactttgaagagggcttctccggcgtggatccgcagccgatgcatgagcgcattcagcaggcgctgggagccattggcgcactgg

SEQ ID NO: 194 - DNA, 613 bp, Artificial Sequence
  Synthetic polynucleotide
  misc_feature (1)..(613): delta-nifL::PinfC
atgaccctgaatatgatgctagaagcgtcaggtaccggtcatgattcaccgtgcgattctcggttccctggagcgcttcattggcatcctgaccgaagagttcgctggcttcttcccaacctggattgcaccagtgcaggtagtggtcatgaatattaccgattctcaggctgaatacgttaacgaattgacgcgtaaactacaaaatgcgggcattcgtgtaaaagcagacttgagaaatgagaagattggctttaaaatccgcgagcacactttacgtcgtgtcccgtatatgttggtctgtggcgacaaagaagtcgaagccggcaaagtggccgtgcgcacccgtcgcgggaaagacctcggcagcatggacgtaagtgaagtgattgagaagctgcaacaagagattcgcagccgcagtcttcaacaactggaggaataaggtattaaaggcggaaaacgagttcaaacggcacgtccgaatcgtatcaatggcgagattcgcgccctggaagttcgcgccattgagctggcttcccgaccgcagggcggcacctgcctgaccctgcgtttcccgctgtttaacaccctgaccggaggtgaagcatga

SEQ ID NO: 195 - DNA, 1613 bp, Artificial Sequence
  Synthetic polynucleotide
  misc_feature (1)..(1613): delta-nifL::PinfC with 500bp flank
ggccgtcgcccagcgtcggcgtccccaacagcagggccgggtaggccagcaggtccgccagcgtggcgcggttaatattgaccggggcggcggcggcctcccccagctgcttgtggatcattttcgcgatcttgcgggttttaccggtatcggtaccaaagaaaatgccaatgttcgccatagtacgctcctgtcggaatggtgttgaaaaaaggaatgacgacagaggtattgcgaaggctgtgccaggttgccctgcaccgcgacggcccatccctgccccatcaggatcgcttcgcatcacgatgccgcgcgccaaaggcgcacccggcggggcgaaaggtaaaaatccgtgaattttccccctgtcggatcaatgtttcgcgtggtcgttccgataagggcgcacactttgcatggttatccgggttcggcttaccccgccgcgttttgcgcacggtgtcggacaatttgtcataactgcgacacaggagtttgcgatgaccctgaatatgatgctagaagcgtcaggtaccggtcatgattcaccgtgcgattctcggttccctggagcgcttcattggcatcctgaccgaagagttcgctggcttcttcccaacctggattgcaccagtgcaggtagtggtcatgaatattaccgattctcaggctgaatacgttaacgaattgacgcgtaaactacaaaatgcgggcattcgtgtaaaagcagacttgagaaatgagaagattggctttaaaatccgcgagcacactttacgtcgtgtcccgtatatgttggtctgtggcgacaaagaagtcgaagccggcaaagtggccgtgcgcacccgtcgcgggaaagacctcggcagcatggacgtaagtgaagtgattgagaagctgcaacaagagattcgcagccgcagtcttcaacaactggaggaataaggtattaaaggcggaaaacgagttcaaacggcacgtccgaatcgtatcaatggcgagattcgcgccctggaagttcgcgccattgagctggcttcccgaccgcagggcggcacctgcctgaccctgcgtttcccgctgtttaacaccctgaccggaggtgaagcatgatccctgaatccgacccggacaccaccgtcagacgcttcgacctctctcagcagttcaccgccatgcagcggataagcgtggtgctgagccgggccaccgaggccagcaaaacgctgcaggaggtgctcagcgtattacacaacgatgcctttatgcagcacgggatgatctgcctgtacgacagcgagcaggagatcctcagtatcgaagcgctgcagcaaaccggccagcagcccctccccggcagcacgcagatccgctatcgccccggcgagggactggtggggaccgtgctggcccaggggcagtcgctggtgctgccccgggtcgccgacgatcagcgttttctcgaccgcctgagcctctacgattacgatctgccgtttatcgccgtaccgttgatggggcccaacgcccggccaataggggtgctggcggcccagccgatggcgcgccaggaagagcggctgccggcctgcacccgttttctcgaaaccgtc

SEQ ID NO: 196 - DNA, 1155 bp, Artificial Sequence
  Synthetic polynucleotide
  misc_feature (1)..(1155): glnE-delta-AR-2 36bp deletion
atggcgctgaagcacctgatcacgctctgcgcggcgtcgccgatggtcgccagccagctggcgcgccacccgctgctgctggatgagctgctggatcccaacaccctctatcagccgacggcgaccgatgcctatcgcgacgagctgcgccagtacctgctgcgcgtgccggaagaggatgaagagcagcagctgcatatcgcggcggcggatatcgctggtaccctgccggtgatgaaggtcagcgatcacttaacctggcttgccgaagcgatcctcgacgcggtggtgcagcaggcatgggggcagatggtcgctcgctacggccagccgacccacctgcacgatcgccagggtcgcggcttcgccgtcgtcggctacggtaagcttggcggctgggagctgggctacagctccgatctcgatctggtgttcctccatgactgcccggcggaggtgatgaccgacggcgagcgggagattgacggccgtcagttctacctgcggctggcccagcggatcatgcacctgttcagcacccgcacctcgtccggtattctctacgaagtggacgcccggctgcgtccttctggcgcggcggggatgctggtcaccaccgccgacgcgtttgctgactatcagcagaacgaagcctggacgtgggaacatcaggcgctggtgcgcgcccgcgtggtctatggcgacccggcgctgcaggcgcgctttgacgccattcgtcgcgatatcctgaccaccccgcgggaggggatgaccctgcagaccgaggttcgcgagatgcgcgagaagatgcgcgcccaccttggcaacaaacatcccgatcgttttgatatcaaagccgatgccggcgggatcaccgatattgaatttattactcagtatctggtcctacgctatgccagtgacaagccgaagctgacccgctggtctgacaacgtgcgtattcttgagctgctggcgcagaacgacatcatggacgaggaggaggcgcgcgccttaacgcatgcgtacaccaccttgcgtgatgcgctccatcacctggccctgcaggagcagccgggacacgtggcgccagaggccttcagccgggagcgtcagcaggtcagcgccagctggcagaagtggctgatggcttaa

SEQ ID NO: 197 - DNA, 2155 bp, Artificial Sequence
  Synthetic polynucleotide
  misc_feature (1)..(2155): glnE-delta-AR-2 36bp deletion
cgtaaggcgaccacccagctccgcgcgttgctgaacgacgctgaagccgttctgctggccgcggacaccgccgacgaggcgttattccgcaccgaggtcgtcggcgccaaactggccctgactgaatggctggtccagcgcggctggcgtccgttcctcaacgaggcaggagagaaaaaaatagccggatcgttcaaacggtttgccgatattaacctctcgcgggtggcggccgagctgcgcagcgccgtgcagcatctggcggttgaagatgccgccgaccagttgccgaagctgtcccgcgacatcgacagcgtccagctgctggcgggcgcctatggcgacgccgtcgcgccgtggctggagaactggcaggagcttcaccgtgcaatagcacatgacgatcgcagcgtctttgaatatttccgtcgccaggcgctggctgccgagccgttctggctgcatagtggaaaacgataatttcaggccagggagcccttatggcgctgaagcacctgatcacgctctgcgcggcgtcgccgatggtcgccagccagctggcgcgccacccgctgctgctggatgagctgctggatcccaacaccctctatcagccgacggcgaccgatgcctatcgcgacgagctgcgccagtacctgctgcgcgtgccggaagaggatgaagagcagcagctgcatatcgcggcggcggatatcgctggtaccctgccggtgatgaaggtcagcgatcacttaacctggcttgccgaagcgatcctcgacgcggtggtgcagcaggcatgggggcagatggtcgctcgctacggccagccgacccacctgcacgatcgccagggtcgcggcttcgccgtcgtcggctacggtaagcttggcggctgggagctgggctacagctccgatctcgatctggtgttcctccatgactgcccggcggaggtgatgaccgacggcgagcgggagattgacggccgtcagttctacctgcggctggcccagcggatcatgcacctgttcagcacccgcacctcgtccggtattctctacgaagtggacgcccggctgcgtccttctggcgcggcggggatgctggtcaccaccgccgacgcgtttgctgactatcagcagaacgaagcctggacgtgggaacatcaggcgctggtgcgcgcccgcgtggtctatggcgacccggcgctgcaggcgcgctttgacgccattcgtcgcgatatcctgaccaccccgcgggaggggatgaccctgcagaccgaggttcgcgagatgcgcgagaagatgcgcgcccaccttggcaacaaacatcccgatcgttttgatatcaaagccgatgccggcgggatcaccgatattgaatttattactcagtatctggtcctacgctatgccagtgacaagccgaagctgacccgctggtctgacaacgtgcgtattcttgagctgctggcgcagaacgacatcatggacgaggaggaggcgcgcgccttaacgcatgcgtacaccaccttgcgtgatgcgctccatcacctggccctgcaggagcagccgggacacgtggcgccagaggccttcagccgggagcgtcagcaggtcagcgccagctggcagaagtggctgatggcttaactataaaatcgggtgtgctattatcgcgcgcaaagtttgcgtctcgcaggagagagtcatgaaagtaacgctgccggagtttgaacgtgcaggagtgttggtggtgggtgatgtgatgctggaccgctactggtacggccccaccagtcgtatttccccggaagccccggtgccggtggtgaaggtggaaaatatcgaagaacgtcctggcggcgcggcaaacgtagcgatgaacatcgcctccctgggggcaacgtcgcgcctggtgggattgaccgggattgatgacgctgcccgcgcgctgagccaggcgctggccaatgtgaatgtgaagtgcgacttcgtctccgtcccgactcacccgaccatcaccaagctgcgggtgctgtcgcgcaatcagcagctgatccgcctcgactttgaagagggcttctccggcgtggatccgcagccgatgcatgagcgcattcagcaggcgctgggagccattggcgcactgg

SEQ ID NO: 198 - DNA, 412 bp, Artificial Sequence
  Synthetic polynucleotide
  misc_feature (1)..(412): delta-nifL::Prm8.2
atgaccctgaatatgatgctcgacgccgtcctcgcagtaccattgcaaccgactttacagcaagaagtgattctggcacgcatggaacaaattcttgccagtcgggctttatccgatgacgaacgcgcacagcttttatatgagcgcggagtgttgtatgatagtctcggtctgagggcattagcgcgaaatgatttttcacaagcgctggcaatccgacccgatatgcctgaagtattcaattacttaggcatttacttaacgcaggcaggcaattttgatgctgcctatgaagcgtttgattctgtacttgagcttgatcgccattgagctggcttcccgaccgcagggcggcacctgcctgaccctgcgtttcccgctgtttaacaccctgaccggaggtgaagcatga

SEQ ID NO: 199 - DNA, 1389 bp, Artificial Sequence
  Synthetic polynucleotide
  misc_feature (1)..(1389): delta-nifL::Prm8.2 with 500bp flank
cccaacagcagggccgggtaggccagcaggtccgccagcgtggcgcggttaatattgaccggggcggcggcggcctcccccagctgcttgtggatcattttcgcgatcttgcgggttttaccggtatcggtaccaaagaaaatgccaatgttcgccatagtacgctcctgtcggaatggtgttgaaaaaaggaatgacgacagaggtattgcgaaggctgtgccaggttgccctgcaccgcgacggcccatccctgccccatcaggatcgcttcgcatcacgatgccgcgcgccaaaggcgcacccggcggggcgaaaggtaaaaatccgtgaattttccccctgtcggatcaatgtttcgcgtggtcgttccgataagggcgcacactttgcatggttatccgggttcggcttaccccgccgcgttttgcgcacggtgtcggacaatttgtcataactgcgacacaggagtttgcgatgaccctgaatatgatgctcgacgccgtcctcgcagtaccattgcaaccgactttacagcaagaagtgattctggcacgcatggaacaaattcttgccagtcgggctttatccgatgacgaacgcgcacagcttttatatgagcgcggagtgttgtatgatagtctcggtctgagggcattagcgcgaaatgatttttcacaagcgctggcaatccgacccgatatgcctgaagtattcaattacttaggcatttacttaacgcaggcaggcaattttgatgctgcctatgaagcgtttgattctgtacttgagcttgatcgccattgagctggcttcccgaccgcagggcggcacctgcctgaccctgcgtttcccgctgtttaacaccctgaccggaggtgaagcatgatccctgaatccgacccggacaccaccgtcagacgcttcgacctctctcagcagttcaccgccatgcagcggataagcgtggtgctgagccgggccaccgaggccagcaaaacgctgcaggaggtgctcagcgtattacacaacgatgcctttatgcagcacgggatgatctgcctgtacgacagcgagcaggagatcctcagtatcgaagcgctgcagcaaaccggccagcagcccctccccggcagcacgcagatccgctatcgccccggcgagggactggtggggaccgtgctggcccaggggcagtcgctggtgctgccccgggtcgccgacgatcagcgttttctcgaccgcctgagcctctacgattacgatctgccgtttatcgccgtaccgttgatggggcccaacgcccggccaataggggtgctggcggcccagccgatggcgcgccaggaagagcggctgccggcctgcacccgttttctcgaaaccgtc

SEQ ID NO: 200 - DNA, 1155 bp, Artificial Sequence; identical to SEQ ID NO: 196
  Synthetic polynucleotide
  misc_feature (1)..(1155): glnE-delta-AR-2 36bp deletion

SEQ ID NO: 201 - DNA, 2155 bp, Artificial Sequence; identical to SEQ ID NO: 197
  Synthetic polynucleotide
  misc_feature (1)..(2155): glnE-delta-AR-2 36bp deletion

SEQ ID NO: 202 - DNA, 413 bp, Artificial Sequence
  Synthetic polynucleotide
  misc_feature (1)..(413): delta-nifL::Prm6.2
atgaccctgaatatgatgctcgagctaaagttctcggctaatcgctgataacatttgacgcaatgcgcaataaaagggcatcatttgatgccctttttgcacgctttcataccagaacctggctcatcagtgattttttttgtcataatcattgctgagacaggctctgaagagggcgtttatacaccaaaccattcgagcggtagcgcgacggcaagtcagcgttctcctttgcaatagcagggaagaggcgccagaaccgccagcgttgaagcagtttgaacgcgttcagtgtataatccgaaacttaatttcggtttggagccattgagctggcttcccgaccgcagggcggcacctgcctgaccctgcgtttcccgctgtttaacaccctgaccggaggtgaagcatga

SEQ ID NO: 203 - DNA, 1413 bp, Artificial Sequence
  Synthetic polynucleotide
  misc_feature (1)..(1413): delta-nifL::Prm6.2 with 500bp flank
ggccgtcgcccagcgtcggcgtccccaacagcagggccgggtaggccagcaggtccgccagcgtggcgcggttaatattgaccggggcggcggcggcctcccccagctgcttgtggatcattttcgcgatcttgcgggttttaccggtatcggtaccaaagaaaatgccaatgttcgccatagtacgctcctgtcggaatggtgttgaaaaaaggaatgacgacagaggtattgcgaaggctgtgccaggttgccctgcaccgcgacggcccatccctgccccatcaggatcgcttcgcatcacgatgccgcgcgccaaaggcgcacccggcggggcgaaaggtaaaaatccgtgaattttccccctgtcggatcaatgtttcgcgtggtcgttccgataagggcgcacactttgcatggttatccgggttcggcttaccccgccgcgttttgcgcacggtgtcggacaatttgtcataactgcgacacaggagtttgcgatgaccctgaatatgatgctcgagctaaagttctcggctaatcgctgataacatttgacgcaatgcgcaataaaagggcatcatttgatgccctttttgcacgctttcataccagaacctggctcatcagtgattttttttgtcataatcattgctgagacaggctctgaagagggcgtttatacaccaaaccattcgagcggtagcgcgacggcaagtcagcgttctcctttgcaatagcagggaagaggcgccagaaccgccagcgttgaagcagtttgaacgcgttcagtgtataatccgaaacttaatttcggtttggagccattgagctggcttcccgaccgcagggcggcacctgcctgaccctgcgtttcccgctgtttaacaccctgaccggaggtgaagcatgatccctgaatccgacccggacaccaccgtcagacgcttcgacctctctcagcagttcaccgccatgcagcggataagcgtggtgctgagccgggccaccgaggccagcaaaacgctgcaggaggtgctcagcgtattacacaacgatgcctttatgcagcacgggatgatctgcctgtacgacagcgagcaggagatcctcagtatcgaagcgctgcagcaaaccggccagcagcccctccccggcagcacgcagatccgctatcgccccggcgagggactggtggggaccgtgctggcccaggggcagtcgctggtgctgccccgggtcgccgacgatcagcgttttctcgaccgcctgagcctctacgattacgatctgccgtttatcgccgtaccgttgatggggcccaacgcccggccaataggggtgctggcggcccagccgatggcgcgccaggaagagcggctgccggcctgcacccgttttctcgaaaccgtc

SEQ ID NO: 204 - DNA, 513 bp, Artificial Sequence
  Synthetic polynucleotide
  misc_feature (1)..(513): delta-nifL::Prm1.2
atgaccctgaatatgatgctcgagcccgctgaccgaccagaacttccaccttggactcggctatacccttggcgtgacggcgcgcgataactgggactacatccccattccggtgatcttaccattggcgtcaataggttacggtccggcgactttccagatgacctatattcccggcacctacaataacggtaacgtttacttcgcctgggctcgtatacagttttaattcgctaagtcttagcaataaatgagataagcggtgtgtcttgtggaaaaacaaggactaaagcgttacccactaaaaaagatagcgacttttatcactttttagcaaagttgcactggacaaaaggtaccacaattggtgtactgatactcgacacagcattagtgtcgatttttcatataaaggtaattttggccattgagctggcttcccgaccgcagggcggcacctgcctgaccctgcgtttcccgctgtttaacaccctgaccggaggtgaagcatga

SEQ ID NO: 205 - DNA, 1513 bp, Artificial Sequence
  Synthetic polynucleotide
  misc_feature (1)..(1513): delta-nifL::Prm1.2 with 500bp flank
ggccgtcgcccagcgtcggcgtccccaacagcagggccgggtaggccagcaggtccgccagcgtggcgcggttaatattgaccggggcggcggcggcctcccccagctgcttgtggatcattttcgcgatcttgcgggttttaccggtatcggtaccaaagaaaatgccaatgttcgccatagtacgctcctgtcggaatggtgttgaaaaaaggaatgacgacagaggtattgcgaaggctgtgccaggttgccctgcaccgcgacggcccatccctgccccatcaggatcgcttcgcatcacgatgccgcgcgccaaaggcgcacccggcggggcgaaaggtaaaaatccgtgaattttccccctgtcggatcaatgtttcgcgtggtcgttccgataagggcgcacactttgcatggttatccgggttcggcttaccccgccgcgttttgcgcacggtgtcggacaatttgtcataactgcgacacaggagtttgcgatgaccctgaatatgatgctcgagcccgctgaccgaccagaacttccaccttggactcggctatacccttggcgtgacggcgcgcgataactgggactacatccccattccggtgatcttaccattggcgtcaataggttacggtccggcgactttccagatgacctatattcccggcacctacaataacggtaacgtttacttcgcctgggctcgtatacagttttaattcgctaagtcttagcaataaatgagataagcggtgtgtcttgtggaaaaacaaggactaaagcgttacccactaaaaaagatagcgacttttatcactttttagcaaagttgcactggacaaaaggtaccacaattggtgtactgatactcgacacagcattagtgtcgatttttcatataaaggtaattttggccattgagctggcttcccgaccgcagggcggcacctgcctgaccctgcgtttcccgctgtttaacaccctgaccggaggtgaagcatgatccctgaatccgacccggacaccaccgtcagacgcttcgacctctctcagcagttcaccgccatgcagcggataagcgtggtgctgagccgggccaccgaggccagcaaaacgctgcaggaggtgctcagcgtattacacaacgatgcctttatgcagcacgggatgatctgcctgtacgacagcgagcaggagatcctcagtatcgaagcgctgcagcaaaccggccagcagcccctccccggcagcacgcagatccgctatcgccccggcgagggactggtggggaccgtgctggcccaggggcagtcgctggtgctgccccgggtcgccgacgatcagcgttttctcgaccgcctgagcctctacgattacgatctgccgtttatcgccgtaccgttgatggggcccaacgcccggccaataggggtgctggcggcccagccgatggcgcgccaggaagagcggctgccggcctgcacccgttttctcgaaaccgtc

SEQ ID NO: 206 - DNA, 1155 bp, Artificial Sequence; identical to SEQ ID NO: 196
  Synthetic polynucleotide
  misc_feature (1)..(1155): glnE-delta-AR-2 36bp deletion

SEQ ID NO: 207 - DNA, 2155 bp, Artificial Sequence; identical to SEQ ID NO: 197
  Synthetic polynucleotide
  misc_feature (1)..(2155): glnE-delta-AR-2 36bp deletion

SEQ ID NO: 208 - DNA, 613 bp, Artificial Sequence; identical to SEQ ID NO: 194
  Synthetic polynucleotide
  misc_feature (1)..(613): delta-nifL::PinfC

SEQ ID NO: 209 - DNA, 1613 bp, Artificial Sequence; identical to SEQ ID NO: 195
  Synthetic polynucleotide
  misc_feature (1)..(1613): delta-nifL::PinfC with 500bp flank

SEQ ID NO: 210 - DNA, 1191 bp, Artificial Sequence; identical to SEQ ID NO: 192
  Synthetic polynucleotide
  misc_feature (1)..(1191): glnE-delta-AR-2

SEQ ID NO: 211 - DNA, 2191 bp, Artificial Sequence; identical to SEQ ID NO: 193
  Synthetic polynucleotide
  misc_feature (1)..(2191): glnE-delta-AR-2 with 500bp flank

SEQ ID NO: 212 - DNA, 1188 bp, Artificial Sequence
  Synthetic polynucleotide
  misc_feature (1)..(1188): glnE-delta-AR-2
atggcgctcaaacagttaatccgtctgtgtgccgcctcgccgatggtcgcgacacaacttgcacgtcatcctttattgctcgatgaactgctcgacccgcgcacgctttaccagccgattgagccgggcgcttaccgcgacgaactgcgtcagtatctgatgcgggtgccaacagaagacgaagaacagcagcttgaagccgtgcgccagttcaaacaggcccagcatttgcgtatcgcagccggggatatttccggggcattgccggtgatgaaagtcagtgaccatttaacctaccttgccgaggccattctcgatgtcgtggtgcagcatgcgtgggaacaaatggtcgtaaaatacgggcagcccgcgcatcttcagcaccgtgaggggcgcggttttgccgtggtcggttacgggaaactcggtggctgggagctgggttatagctcagatctggatctggtcttcctgctcgattgcgcgccggaggtgatgacggacggcgaacgcagcatcgacggacgtcagttttatcttcggctggcgcagcgcattatgcacttattcagcacccggacatcgtcaggcattctttacgaggttgatccgcgtctgcgaccttccggcgcatccggcatgctggtcagtaccattgaagcgtttgcagattatcaggccaatgaagcctggacgtgggagcatcaggcgctggttcgcgcgcgcgtggtttacggggatccgcaactgacacagcaatttaacgccacgcgtcgcgacattctttgccgccagcgcgatggcgacggcctgcgtaaggaggtccgtgaaatgcgcgagaaaatgtatgcccatctggggagtaaaaaagcccacgagtttgatctgaaagccgatccgggtggcatcacggatattgaattcattgcacaatacctggttctgcgtttcgcgcatgatgagccgaagctgacgcgctggtctgataacgtgcggatttttgaactgatggcacgatatgacatcatgccggaagaggaagcgcgccatctgacgcaggcttatgtgacgctgcgcgatgaaattcatcatctggcgttgcaggaacacagcgggaaagtggccgcggacagctttgctactgagcgcgcgcagatccgtgccagctgggcaaagtggctcggctga

SEQ ID NO: 213 - DNA, 2188 bp, Artificial Sequence
  Synthetic polynucleotide
  misc_feature (1)..(2188): glnE-delta-AR-2 with 500bp flank
cggtactggaacagaaatcggcggatgcgcaggaaatttgttatgacacggcctgtctgaagtgcaagttagtgcttacttcctggctggcaacctcaggctggacgccgtttattgatgataaatctgcgaagaaactggacgcttccttcaaacgttttgctgacatcatgctcggtcgtaccgcagcggatctgaaagaagcctttgcgcagccactgacggaagaaggttatcgcgatcagctggcgcgcctgaaacgccagatcattaccttccatttgcttgccggtgcttaccctgaaaaagacgtcgatgcgtatattgccggctgggtggacctgcaacaggccatcgttcagcagcaacacgcctgggaggattcggcccgttctcacgcggtgatgatggatgctttctggttaaacgggcaacctcgttaactgactgactagcctgggcaaactgcccgggcttttttttgcaaggaatctgatttcatggcgctcaaacagttaatccgtctgtgtgccgcctcgccgatggtcgcgacacaacttgcacgtcatcctttattgctcgatgaactgctcgacccgcgcacgctttaccagccgattgagccgggcgcttaccgcgacgaactgcgtcagtatctgatgcgggtgccaacagaagacgaagaacagcagcttgaagccgtgcgccagttcaaacaggcccagcatttgcgtatcgcagccggggatatttccggggcattgccggtgatgaaagtcagtgaccatttaacctaccttgccgaggccattctcgatgtcgtggtgcagcatgcgtgggaacaaatggtcgtaaaatacgggcagcccgcgcatcttcagcaccgtgaggggcgcggttttgccgtggtcggttacgggaaactcggtggctgggagctgggttatagctcagatctggatctggtcttcctgctcgattgcgcgccggaggtgatgacggacggcgaacgcagcatcgacggacgtcagttttatcttcggctggcgcagcgcattatgcacttattcagcacccggacatcgtcaggcattctttacgaggttgatccgcgtctgcgaccttccggcgcatccggcatgctggtcagtaccattgaagcgtttgcagattatcaggccaatgaagcctggacgtgggagcatcaggcgctggttcgcgcgcgcgtggtttacggggatccgcaactgacacagcaatttaacgccacgcgtcgcgacattctttgccgccagcgcgatggcgacggcctgcgtaaggaggtccgtgaaatgcgcgagaaaatgtatgcccatctggggagtaaaaaagcccacgagtttgatctgaaagccgatccgggtggcatcacggatattgaattcattgcacaatacctggttctgcgtttcgcgcatgatgagccgaagctgacgcgctggtctgataacgtgcggatttttgaactgatggcacgatatgacatcatgccggaagaggaagcgcgccatctgacgcaggcttatgtgacgctgcgcgatgaaattcatcatctggcgttgcaggaacacagcgggaaagtggccgcggacagctttgctactgagcgcgcgcagatccgtgccagctgggcaaagtggctcggctgagggtttttattcggctaacaggcgcttgtgatattatccggcgcattgtatttacccgatttgatttatctgttttggagtcttgggatgaaagtgactttgcctgattttcaccgcgcaggtgtgctggttgtcggtgacgtaatgttagaccgttactggtatggcccgaccaatcgtatttctccggaagctccggtgccggtggtgaaggtcagtaccattgaagagcggcctggcggtgcagctaacgtggcgatgaacatttcatctctgggcgcctcttcctgtctgatcggcctgaccggcgtagacgacgctgcgcgtgccctcagtgagcgtctggcagaagtgaaagttaactgcgatttcgtcgcactatccacacatcctaccatcaccaaactgcgaattttgtcccgtaaccagcaactgatccgcctcgactttgaggaaggttttgaaggcgttgatctcgagccgatgctgaccaaaataga

SEQ ID NO: 214 - DNA, 635 bp, Artificial Sequence
  Synthetic polynucleotide
  misc_feature (1)..(635): delta-nifL::Prm6.1
atgagcatcacggcgttatcagcatcatttcctgaggggaatatcgccagccgcttgtcgctgcaacatccttcactgttttataccgtggttgaacaatcttcggtggcgatttcgctgaccgatccgcaggcgcgcatttgttatgccaatccggcattctgccgccagacgggttttgcacttgagacacttttgggcgagaaccaccgtctgctggaattttttttcacaaagcgtagcgttattgaatcgcacattttaaactgttggccgctgtggaagcgaatattggtgaaaggtgcggttttaaggcctttttctttgactctctgtcgttacaaagttaatatgcgcgccctccgtctctgaagctctcggtgaacattgttgcgaggcaggatgcgagctggttgtgttttgacattaccgataatgtgccgcgtgaacgggtgcgttatgcccgcccggaagcggcgttttcccgtccggggaatggcatggagctgcgccttatccagacgctgatcgcccatcatcgcggttctttagatctctcggtccgccctgatggcggcaccttgctgacgttacgcctgccggtacagcaggttatcaccggaggcttaaaatga

SEQ ID NO: 215 - DNA, 1635 bp, Artificial Sequence
  Synthetic polynucleotide
  misc_feature (1)..(1635): delta-nifL::Prm6.1 with 500bp flank
tgtttcgtctcgaggccgggcaactgagcggccccgttgaaaccgacctgggctggcatctgttgttgtgcgaacaaattcgcctgccgcaacccttgccgaaagccgaagccttaacgcgggtgcgtcagcaactgattgcccggcaacagaaacattatcagcgccagtggctgcaacaactgatcaacgcctgagcctgttctccttcttgttgatgcagacgggttaatgcccgttttgcacgaaaaatgcacataaattgcctgcgttgccttataacagcgcagggaaatcctgcctccggccttgtgccacaccgcgctttgcctggtttgtggtaaaaactggcccgctttgcatcctgatgcttaaaacaccccgttcagatcaacctttgggcagataagcccgcgaaaggcctgcaaattgcacggttattccgggtgagtatatgtgtgatttgggttccggcattgcgcaataaaggggagaaagacatgagcatcacggcgttatcagcatcatttcctgaggggaatatcgccagccgcttgtcgctgcaacatccttcactgttttataccgtggttgaacaatcttcggtggcgatttcgctgaccgatccgcaggcgcgcatttgttatgccaatccggcattctgccgccagacgggttttgcacttgagacacttttgggcgagaaccaccgtctgctggaattttttttcacaaagcgtagcgttattgaatcgcacattttaaactgttggccgctgtggaagcgaatattggtgaaaggtgcggttttaaggcctttttctttgactctctgtcgttacaaagttaatatgcgcgccctccgtctctgaagctctcggtgaacattgttgcgaggcaggatgcgagctggttgtgttttgacattaccgataatgtgccgcgtgaacgggtgcgttatgcccgcccggaagcggcgttttcccgtccggggaatggcatggagctgcgccttatccagacgctgatcgcccatcatcgcggttctttagatctctcggtccgccctgatggcggcaccttgctgacgttacgcctgccggtacagcaggttatcaccggaggcttaaaatgacccagttacctaccgcgggcccggttatccggcgctttgatatgtctgcccagtttacggcgctttatcgcatcagcgtggcgctgagtcaggaaagcaacaccgggcgcgcactggcggcgatcctcgaagtgcttcacgatcatgcatttatgcaatacggcatggtgtgtctgtttgataaagaacgcaatgcactctttgtggaatccctgcatggcatcgacggcgaaaggaaaaaagagacccgccatgtccgttaccgcatgggggaaggcgtgatcggcgcggtgatgagccagcgtcaggcgctggtgttaccgcgcatttcagacgatcagcgttttctcgaccgcctgaatatttacgattacagcctgccgttgattggcgtgccgatccccggtgcggataatcagccatcgggcgtgctggtggcacagccgatggcgttgcacgaagaccggctgactgccagtacgcggtttttagaaatggtc

SEQ ID NO: 216 - DNA, 635 bp, Artificial Sequence; identical to SEQ ID NO: 214
  Synthetic polynucleotide
  misc_feature (1)..(635): delta-nifL::Prm6.1

SEQ ID NO: 217 - DNA, 1635 bp, Artificial Sequence; identical to SEQ ID NO: 215
  Synthetic polynucleotide
  misc_feature (1)..(1635): delta-nifL::Prm6.1 with 500bp flank

SEQ ID NO: 218 - DNA, 786 bp, Artificial Sequence
  Synthetic polynucleotide
  misc_feature (1)..(786): delta-nifL::Prm7.1
atgagcatcacggcgttatcagcatcatttcctgaggggaatatcgccagccgcttgtcgctgcaacatccttcactgttttataccgtggttgaacaatcttcggtggcgatttcgctgaccgatccgcaggcgcgcatttgttatgccaatccggcattctgccgccagacgggttttgcacttgagacacttttgggcgagaaccaccgtctgctggttaaaaacgtgaccacgagcattaataaacgccacgaaatgtggcgtttatttattcaaaaagtatcttctttcataaaaagtgctaaatgcagtagcagcaaaattgggataagtcccatggaatacggctgttttcgctgcaatttttaactttttcgtaaaaaaagatgtttctttgagcgaacgatcaaaatatagcgttaaccggcaaaaaattattctcattagaaaatagtttgtgtaatacttgtaacgctacatggagattaacttaatctagagggttttataccgtctctgaagctctcggtgaacattgttgcgaggcaggatgcgagctggttgtgttttgacattaccgataatgtgccgcgtgaacgggtgcgttatgcccgcccggaagcggcgttttcccgtccggggaatggcatggagctgcgccttatccagacgctgatcgcccatcatcgcggttctttagatctctcggtccgccctgatggcggcaccttgctgacgttacgcctgccggtacagcaggttatcaccggaggcttaaaatga

SEQ ID NO: 219 - DNA, 1786 bp, Artificial Sequence
  Synthetic polynucleotide
  misc_feature (1)..(1786): delta-nifL::Prm7.1 with 500bp flank
gtttcgtctcgaggccgggcaactgagcggccccgttgaaaccgacctgggctggcatctgttgttgtgcgaacaaattcgcctgccgcaacccttgccgaaagccgaagccttaacgcgggtgcgtcagcaactgattgcccggcaacagaaacattatcagcgccagtggctgcaacaactgatcaacgcctgagcctgttctccttcttgttgatgcagacgggttaatgcccgttttgcacgaaaaatgcacataaattgcctgcgttgccttataacagcgcagggaaatcctgcctccggccttgtgccacaccgcgctttgcctggtttgtggtaaaaactggcccgctttgcatcctgatgcttaaaacaccccgttcagatcaacctttgggcagataagcccgcgaaaggcctgcaaattgcacggttattccgggtgagtatatgtgtgatttgggttccggcattgcgcaataaaggggagaaagacatgagcatcacggcgttatcagcatcatttcctgaggggaatatcgccagccgcttgtcgctgcaacatccttcactgttttataccgtggttgaacaatcttcggtggcgatttcgctgaccgatccgcaggcgcgcatttgttatgccaatccggcattctgccgccagacgggttttgcacttgagacacttttgggcgagaaccaccgtctgctggttaaaaacgtgaccacgagcattaataaacgccacgaaatgtggcgtttatttattcaaaaagtatcttctttcataaaaagtgctaaatgcagtagcagcaaaattgggataagtcccatggaatacggctgttttcgctgcaatttttaactttttcgtaaaaaaagatgtttctttgagcgaacgatcaaaatatagcgttaaccggcaaaaaattattctcattagaaaatagtttgtgtaatacttgtaacgctacatggagattaacttaatctagagggttttataccgtctctgaagctctcggtgaacattgttgcgaggcaggatgcgagctggttgtgttttgacattaccgataatgtgccgcgtgaacgggtgcgttatgcccgcccggaagcggcgttttcccgtccggggaatggcatggagctgcgccttatccagacgctgatcgcccatcatcgcggttctttagatctctcggtccgccctgatggcggcaccttgctgacgttacgcctgccggtacagcaggttatcaccggaggcttaaaatgacccagttacctaccgcgggcccggttatccggcgctttgatatgtctgcccagtttacggcgctttatcgcatcagcgtggcgctgagtcaggaaagcaacaccgggcgcgcactggcggcgatcctcgaagtgcttcacgatcatgcatttatgcaatacggcatggtgtgtctgtttgataaagaacgcaatgcactctttgtggaatccctgcatggcatcgacggcgaaaggaaaaaagagacccgccatgtccgttaccgcatgggggaaggcgtgatcggcgcggtgatgagccagcgtcaggcgctggtgttaccgcgcatttcagacgatcagcgttttctcgaccgcctgaatatttacgattacagcctgccgttgattggcgtgccgatccccggtgcggataatcagccatcgggcgtgctggtggcacagccgatggcgttgcacgaagaccggctgactgccagtacgcggtttttagaaatggtcg

SEQ ID NO: 220 - DNA, 993 bp, Artificial Sequence
  Synthetic polynucleotide
  misc_feature (1)..(993): delta-nifL::Prm1.2
atgagcatcacggcgttatcagcatcatttcctgaggggaatatcgccagccgcttgtcgctgcaacatccttcactgttttataccgtggttgaacaatcttcggtggcgatttcgctgaccgatccgcaggcgcgcatttgttatgccaatccggcattctgccgccagacgggttttgcacttgagacacttttgggcgagaaccaccgtctgctggtgaacatcactgatgcacaagctacctatgtcgaagaattaactaaaaaactgcaagatgcaggcattcgcgttaaagccgacttgagaaatgagaagattggctttaaaattcgcgaacacacgctacgccgtgttccttatatgttagtttgtggcgataaagaggtcgaagcaggcaaagttgctgttcgtacccgccgcggcaaagacttaggaagcatggatgttagcgaagtcgttgacaaactgctggcggaaatccgcagcagaagtcttcatcaactggaggaataaagtattaaaggcggaaaacgagttcaaccggcgcgtcctaatcgcattaacaaagagattcgcgcgcaagaagttcgcctcacaggcgtcgatggcgagcagattggtattgtcagtctgaatgaagctcttgaaaaagctgaggaagcgggcgtcgatttagtagaaatcagtccgaatgccgagccgccagtttgtcgaatcccgtctctgaagctctcggtgaacattgttgcgaggcaggatgcgagctggttgtgttttgacattaccgataatgtgccgcgtgaacgggtgcgttatgcccgcccggaagcggcgttttcccgtccggggaatggcatggagctgcgccttatccagacgctgatcgcccatcatcgcggttctttagatctctcggtccgccctgatggcggcaccttgctgacgttacgcctgccggtacagcaggttatcaccggaggcttaaaatga

SEQ ID NO: 221 - DNA, 1993 bp, Artificial Sequence
  Synthetic polynucleotide
  misc_feature (1)..(1993): delta-nifL::Prm1.2 with 500bp flank
tgtttcgtctcgaggccgggcaactgagcggccccgttgaaaccgacctgggctggcatctgttgttgtgcgaacaaattcgcctgccgcaacccttgccgaaagccgaagccttaacgcgggtgcgtcagcaactgattgcccggcaacagaaacattatcagcgccagtggctgcaacaactgatcaacgcctgagcctgttctccttcttgttgatgcagacgggttaatgcccgttttgcacgaaaaatgcacataaattgcctgcgttgccttataacagcgcagggaaatcctgcctccggccttgtgccacaccgcgctttgcctggtttgtggtaaaaactggcccgctttgcatcctgatgcttaaaacaccccgttcagatcaacctttgggcagataagcccgcgaaaggcctgcaaattgcacggttattccgggtgagtatatgtgtgatttgggttccggcattgcgcaataaaggggagaaagacatgagcatcacggcgttatcagcatcatttcctgaggggaatatcgccagccgcttgtcgctgcaacatccttcactgttttataccgtggttgaacaatcttcggtggcgatttcgctgaccgatccgcaggcgcgcatttgttatgccaatccggcattctgccgccagacgggttttgcacttgagacacttttgggcgagaaccaccgtctgctggtgaacatcactgatgcacaagctacctatgtcgaagaattaactaaaaaactgcaagatgcaggcattcgcgttaaagccgacttgagaaatgagaagattggctttaaaattcgcgaacacacgctacgccgtgttccttatatgttagtttgtggcgataaagaggtcgaagcaggcaaagttgctgttcgtacccgccgcggcaaagacttaggaagcatggatgttagcgaagtcgttgacaaactgctggcggaaatccgcagcagaagtcttcatcaactggaggaataaagtattaaaggcggaaaacgagttcaaccggcgcgtcctaatcgcattaacaaagagattcgcgcgcaagaagttcgcctcacaggcgtcgatggcgagcagattggtattgtcagtctgaatgaagctcttgaaaaagctgaggaagcgggcgtcgatttagtagaaatcagtccgaatgccgagccgccagtttgtcgaatcccgtctctgaagctctcggtgaacattgttgcgaggcaggatgcgagctggttgtgttttgacattaccgataatgtgccgcgtgaacgggtgcgttatgcccgcccggaagcggcgttttcccgtccggggaatggcatggagctgcgccttatccagacgctgatcgcccatcatcgcggttctttagatctctcggtccgccctgatggcggcaccttgctgacgttacgcctgccggtacagcaggttatcaccggaggcttaaaatgacccagttacctaccgcgggcccggttatccggcgctttgatatgtctgcccagtttacggcgctttatcgcatcagcgtggcgctgagtcaggaaagcaacaccgggcgcgcactggcggcgatcctcgaagtgcttcacgatcatgcatttatgcaatacggcatggtgtgtctgtttgataaagaacgcaatgcactctttgtggaatccctgcatggcatcgacggcgaaaggaaaaaagagacccgccatgtccgttaccgcatgggggaaggcgtgatcggcgcggtgatgagccagcgtcaggcgctggtgttaccgcgcatttcagacgatcagcgttttctcgaccgcctgaatatttacgattacagcctgccgttgattggcgtgccgatccccggtgcggataatcagccatcgggcgtgctggtggcacagccgatggcgttgcacgaagaccggctgactgccagtacgcggtttttagaaatggtc

SEQ ID NO: 222 - DNA, 993 bp, Artificial Sequence; identical to SEQ ID NO: 220
  Synthetic polynucleotide
  misc_feature (1)..(993): delta-nifL::Prm1.2

SEQ ID NO: 223 - DNA, 1993 bp, Artificial Sequence; identical to SEQ ID NO: 221
  Synthetic polynucleotide
  misc_feature (1)..(1993): delta-nifL::Prm1.2 with 500bp flank

SEQ ID NO: 224 - DNA, 1188 bp, Artificial Sequence; identical to SEQ ID NO: 212
  Synthetic polynucleotide
  misc_feature (1)..(1188): glnE-delta-AR-2

SEQ ID NO: 225 - DNA, 2188 bp, Artificial Sequence; identical to SEQ ID NO: 213
  Synthetic polynucleotide
  misc_feature (1)..(2188): glnE-delta-AR-2 with 500bp flank

SEQ ID NO: 226 - DNA, 663 bp, Artificial Sequence
  Synthetic polynucleotide
  misc_feature (1)..(663): delta-nifL::Prm3.1
atgagcatcacggcgttatcagcatcatttcctgaggggaatatcgccagccgcttgtcgctgcaacatccttcactgttttataccgtggttgaacaatcttcggtggcgatttcgctgaccgatccgcaggcgcgcatttgttatgccaatccggcattctgccgccagacgggttttgcacttgagacacttttgggcgagaaccaccgtctgctggtacagtagcgcctctcaaaaatagataaacggctcatgtacgtgggccgtttattttttctacccataatcgggaaccggtgttataatgccgcgccctcatattgtggggatttcttaatgacctatcctgggtcctaaagttgtagttgacattagcggagcactaacccgtctctgaagctctcggtgaacattgttgcgaggcaggatgcgagctggttgtgttttgacattaccgataatgtgccgcgtgaacgggtgcgttatgcccgcccggaagcggcgttttcccgtccggggaatggcatggagctgcgccttatccagacgctgatcgcccatcatcgcggttctttagatctctcggtccgccctgatggcggcaccttgctgacgttacgcctgccggtacagcaggttatcaccggaggcttaaaatga

SEQ ID NO: 227 - DNA, 1663 bp, Artificial Sequence
  Synthetic polynucleotide
  misc_feature (1)..(1663): delta-nifL::Prm3.1 with 500bp flank
tgtttcgtctcgaggccgggcaactgagcggccccgttgaaaccgacctgggctggcatctgttgttgtgcgaacaaattcgcctgccgcaacccttgccgaaagccgaagccttaacgcgggtgcgtcagcaactgattgcccggcaacagaaacattatcagcgccagtggctgcaacaactgatcaacgcctgagcctgttctccttcttgttgatgcagacgggttaatgcccgttttgcacgaaaaatgcacataaattgcctgcgttgccttataacagcgcagggaaatcctgcctccggccttgtgccacaccgcgctttgcctggtttgtggtaaaaactggcccgctttgcatcctgatgcttaaaacaccccgttcagatcaacctttgggcagataagcccgcgaaaggcctgcaaattgcacggttattccgggtgagtatatgtgtgatttgggttccggcattgcgcaataaaggggagaaagacatgagcatcacggcgttatcagcatcatttcctgaggggaatatcgccagccgcttgtcgctgcaacatccttcactgttttataccgtggttgaacaatcttcggtggcgatttcgctgaccgatccgcaggcgcgcatttgttatgccaatccggcattctgccgccagacgggttttgcacttgagacacttttgggcgagaaccaccgtctgctggtacagtagcgcctctcaaaaatagataaacggctcatgtacgtgggccgtttattttttctacccataatcgggaaccggtgttataatgccgcgccctcatattgtggggatttcttaatgacctatcctgggtcctaaagttgtagttgacattagcggagcactaacccgtctctgaagctctcggtgaacattgttgcgaggcaggatgcgagctggttgtgttttgacattaccgataatgtgccgcgtgaacgggtgcgttatgcccgcccggaagcggcgttttcccgtccggggaatggcatggagctgcgccttatccagacgctgatcgcccatcatcgcggttctttagatctctcggtccgccctgatggcggcaccttgctgacgttacgcctgccggtacagcaggttatcaccggaggcttaaaatgacccagttacctaccgcgggcccggttatccggcgctttgatatgtctgcccagtttacggcgctttatcgcatcagcgtggcgctgagtcaggaaagcaacaccgggcgcgcactggcggcgatcctcgaagtgcttcacgatcatgcatttatgcaatacggcatggtgtgtctgtttgataaagaacgcaatgcactctttgtggaatccctgcatggcatcgacggcgaaaggaaaaaagagacccgccatgtccgttaccgcatgggggaaggcgtgatcggcgcggtgatgagccagcgtcaggcgctggtgttaccgcgcatttcagacgatcagcgttttctcgaccgcctgaatatttacgattacagcctgccgttgattggcgtgccgatccccggtgcggataatcagccatcgggcgtgctggtggcacagccgatggcgttgcacgaagaccggctgactgccagtacgcggtttttagaaatggtc

SEQ ID NO: 228 - DNA, 1188 bp, Artificial Sequence; identical to SEQ ID NO: 212
  Synthetic polynucleotide
  misc_feature (1)..(1188): glnE-delta-AR-2

SEQ ID NO: 229 - DNA, 2188 bp, Artificial Sequence; identical to SEQ ID NO: 213
  Synthetic polynucleotide
  misc_feature (1)..(2188): glnE-delta-AR-2 with 500bp flank

SEQ ID NO: 230 - DNA, 613 bp, Artificial Sequence
  Synthetic polynucleotide
  misc_feature (1)..(613): delta-nifL::PinfC
atgagcatcacggcgttatcagctgaatatcactgactcacaagctacctatgtcgaagaattaactaaaaaactgcaagatgcaggcattcgcgttaaagccgacttgagaaatgagaagattggctttaaaattcgcgaacacacgctacgccgtgttccttatatgttagtttgtggcgataaagaggtcgaagcaggcaaagttgctgttcgtactcgtcgcggcaaagacttaggaagcatggatgttagcgaagtcgttgacaaactgctggcggaaatccgcagcagaagtcatcatcaactggaggaataaagtattaaaggcggaaaacgagttcaaccggcgcgtcctaatcgcattaacaaagagattcgcgcgcaagaagttcgcctcaccggcgtcgatggcgagcagattggtattgtcagtctgaatgaagctcttgaaaaagctgaggaagcgggcgtcgatttagtagaaatcagtccgaatgccgagccgccagtttgtcgaatctctttagatctctcggtccgccctgatggcggcaccttgctgacgttacgcctgccggtacagcaggttatcaccggaggcttaaaatga

SEQ ID NO: 231 - DNA, 1613 bp, Artificial Sequence
  Synthetic polynucleotide
  misc_feature (1)..(1613): delta-nifL::PinfC with 500bp flank
tgtttcgtctcgaagccgggcaactgagcagccccgttgaaaccgaactgggctggcatctgttgttgtgcgaacaaattcgcctgccgcaacccttgccgaaagccgaggccttaacgcgggtgcgtcagcaactgattgcccggcaacagaatcattatcagcgccagtggctgcaacaactgatcaacgcctgagcctgttctccttcttgttggtgcagacgggttaatgcccgttttgcacgaaaaatgcacataaactgccttcgctgccttataacagcgcatggaaatcctgcctcctgccttgtgccacgccgcgctttgcctggtttgtggtaaaaactggcccgctttgcatcctgatgtttaaaacaccccgttcagatcaacctttgggcagataagcccgcgaaaggcctgcaaattgcacggttattccgggtgagtatatgtgtgatttgggttccggcattgcgcaataaaggggagaaagacatgagcatcacggcgttatcagctgaatatcactgactcacaagctacctatgtcgaagaattaactaaaaaactgcaagatgcaggcattcgcgttaaagccgacttgagaaatgagaagattggctttaaaattcgcgaacacacgctacgccgtgttccttatatgttagtttgtggcgataaagaggtcgaagcaggcaaagttgctgttcgtactcgtcgcggcaaagacttaggaagcatggatgttagcgaagtcgttgacaaactgctggcggaaatccgcagcagaagtcatcatcaactggaggaataaagtattaaaggcggaaaacgagttcaaccggcgcgtcctaatcgcattaacaaagagattcgcgcgcaagaagttcgcctcaccggcgtcgatggcgagcagattggtattgtcagtctgaatgaagctcttgaaaaagctgaggaagcgggcgtcgatttagtagaaatcagtccgaatgccgagccgccagtttgtcgaatctctttagatctctcggtccgccctgatggcggcaccttgctgacgttacgcctgccggtacagcaggttatcaccggaggcttaaaatgacccagttacctaccgcgggcccggttatccggcgctttgatatgtctgcccagtttacggcgctttatcgcatcagcgtggcgctgagtcaggaaagcaataccgcgcgcgcactggcggcgatcctcgaagtgcttcacgatcatgcatttatgcaatacggcatggtgtgtctgttcgataaagaacgcaatgcactgtttgtggaatccctgcatggcatcgacggcgaaaggaaaaaagaaacccgccatgtccgttaccgcatgggggaaggcgtgatcggcgcggtgatgagccagcgtcaggcgctggtgttaccgcgcatttcagacgatcagcgttttctcgaccgcctgaatatttacgattacagcctgccgctgattggtgtgccgatccccggtgcggataatcagcctgcgggtgtgctggtggcacagccgatggcgttgcacgaagaccggctggctgccagtacgcggtttttagaaatggtc

SEQ ID NO: 232 - DNA, 426 bp, Artificial Sequence; identical to SEQ ID NO: 38
  Synthetic polynucleotide
  misc_feature (1)..(426): delta-nifL::Prm5

SEQ ID NO: 233 - DNA, 1426 bp, Artificial Sequence
  Synthetic polynucleotide
  misc_feature (1)..(1426): delta-nifL::Prm5 with 500bp flank
accggatacgagagaaaagtgtctacatcggttcggttgatattgaccggcgcatccgccagcccgcccagtttctggtggatctgtttggcgattttgcgggtcttgccggtgtcggtgccgaaaaaaataccaatatttgccataacacacgctcctgttgaaaaagagatcccgccgggaaatgcggtgaacgtgtctgatattgcgaagagtgtgccagttttggtcgcgggcaaaacctgcaccagtttggttattaatgcaccagtctggcgctttttttcgccgagtttctcctcgctaatgcccgccaggcgcggctttggcgctgatagcgcgctgaataccgatctggatcaaggttttgtcgggttatcagccaaaaggtgcactctttgcatggttatacgtgcctgacatgttgtccgggcgacaaacggcctggtggcacaaattgtcagaactacgacacgactaactgaccgcaggagtgtgcgatgaccctgaatatgatgatggatgccggcggacatcatcgcgacaaacaatattaataccggcaaccacaccggcaatttacgagactgcgcaggcatcctttctcccgtcaatttctgtcaaataaagtaaaagaggcagtctacttgaattacccccggctggttgagcgtttgttgaaaaaaagtaactgaaaaatccgtagaatagcgccactctgatggttaattaacctattcaattaagaattatctggatgaatgtgccattaaatgcgcagcataatggtgcgttgtgcgggaaaactgcttttttttgaaagggttggtcagtagcggaaacaactcacttcacaccccgaagggggaagttgcctgaccctacgattcccgctatttcattcactgaccggaggttcaaaatgacccagcgaaccgagtcgggtaataccgtctggcgcttcgatttgtcccagcagttcactgcgatgcagcgcataagcgtggtactcagccgggcgaccgaggtcgatcagacgctccagcaagtgctgtgcgtattgcacaatgacgcctttttgcagcacggcatgatctgtctgtacgacagccagcaggcgattttgaatattgaagcgttgcaggaagccgatcagcagttaatccccggcagctcgcaaatccgctatcgtccgggcgaagggctggtcgggacggtgctttcgcagggccaatcattagtgctggcgcgcgttgctgacgatcagcgctttcttgaccggctcgggttgtatgattacaacctgccgtttatcgccgtgccgctgatagggccagatgcgcagactttcggtgtgctgacggcacaacccatggcgcgttacgaagagcgattacccgcctgcacccgctttctggaaacggtc

SEQ ID NO: 234 - DNA, 461 bp, Artificial Sequence; identical to SEQ ID NO: 41
  Synthetic polynucleotide
  misc_feature (1)..(461): delta-nifL::Prm1

SEQ ID NO: 235 - DNA, 1461 bp, Artificial Sequence
  Synthetic polynucleotide
  misc_feature (1)..(1461): delta-nifL::Prm1 with 500bp flank
accggatacgagagaaaagtgtctacatcggttcggttgatattgaccggcgcatccgccagcccgcccagtttctggtggatctgtttggcgattttgcgggtcttgccggtgtcggtgccgaaaaaaataccaatatttgccataacacacgctcctgttgaaaaagagatcccgccgggaaatgcggtgaacgtgtctgatattgcgaagagtgtgccagttttggtcgcgggcaaaacctgcaccagtttggttattaatgcaccagtctggcgctttttttcgccgagtttctcctcgctaatgcccgccaggcgcggctttggcgctgatagcgcgctgaataccgatctggatcaaggttttgtcgggttatcagccaaaaggtgcactctttgcatggttatacgtgcctgacatgttgtccgggcgacaaacggcctggtggcacaaattgtcagaactacgacacgactaactgaccgcaggagtgtgcgatgaccctgaatatgatgatggatgccggccgtcctgtaataataaccggacaattcggactgattaaaaaagcgcccttgtggcgctttttttatattcccgcctccatttaaaataaaaaatccaatcggatttcactatttaaactggccattatctaagatgaatccgatggaagctcgctgttttaacacgcgttttttaaccttttattgaaagtcggtgcttctttgagcgaacgatcaaatttaagtggattcccatcaaaaaaatattctcaacctaaaaaagtttgtgtaatacttgtaacgctacatggagattaactcaatctagagggtattaataatgaatcgtactaaactggtactgggcgcaactcacttcacaccccgaagggggaagttgcctgaccctacgattcccgctatttcattcactgaccggaggttcaaaatgacccagcgaaccgagtcgggtaataccgtctggcgcttcgatttgtcccagcagttcactgcgatgcagcgcataagcgtggtactcagccgggcgaccgaggtcgatcagacgctccagcaagtgctgtgcgtattgcacaatgacgcctttttgcagcacggcatgatctgtctgtacgacagccagcaggcgattttgaatattgaagcgttgcaggaagccgatcagcagttaatccccggcagctcgcaaatccgctatcgtccgggcgaagggctggtcgggacggtgctttcgcagggccaatcattagtgctggcgcgcgttgctgacgatcagcgctttcttgaccggctcgggttgtatgattacaacctgccgtttatcgccgtgccgctgatagggccagatgcgcagactttcggtgtgctgacggcacaacccatggcgcgttacgaagagcgattacccgcctgcacccgctttctggaaacggtc

SEQ ID NO: 236 - DNA, 461 bp, Artificial Sequence; identical to SEQ ID NO: 41
  Synthetic polynucleotide
  misc_feature (1)..(461): delta-nifL::Prm1

SEQ ID NO: 237 - DNA, 1461 bp, Artificial Sequence; identical to SEQ ID NO: 235
  Synthetic polynucleotide
  misc_feature (1)..(1461): delta-nifL::Prm1 with 500bp flank

SEQ ID NO: 238 - DNA, 1188 bp, Artificial Sequence
  Synthetic polynucleotide
  misc_feature (1)..(1188): glnE-delta-AR-2
atggcactgaaacacctcatttccctgtgtgccgcgtcgccgatggttgccagtcagctggcgcgctacccgatcctgcttgatgaattgctcgacccgaatacgctctatcaaccgacggcgatgaatgcctatcgcgatgagctgcgccaatacctgctgcgcgtgccggaagatgatgaagagcaacagcttgaggcgctgcggcagtttaagcaggcgcagttgctgcgcgtggcggcggcggatattgccggtacgttgccagtaatgaaagtgagcgatcacttaacctggctggcggaagcgattattgatgcggtggtgcagcaagcctgggggcagatggtggcgcgttatggccagccaacgcatctgcacgatcgcgaagggcgcggttttgcggtggtcggttatggcaagctgggcggctgggagctgggttacagctccgatctggatctggtattcctgcacgactgcccgatggatgtgatgaccgatggcgagcgtgaaatcgatggtcgccagttctatttgcgtctcgcgcagcgcgtgatgcacctgtttagcacgcgcacgtcgtccggcatcctttatgaagttgatgcgcgtctgcgtccatctggcgctgcggggatgctggtcactactacggaatcgttcgccgattaccagcaaaacgaagcctggacgtgggaacatcaggcgctggcccgtgcgcgcgtggtgtacggcgatccgcaactgaccgccgaatttgacgccattcgccgcgatattctgatgacgcctcgcgacggcgcaacgctgcaaaccgacgtgcgagaaatgcgcgagaaaatgcgtgcccatcttggcaacaagcataaagaccgcttcgatctgaaagccgatgaaggcggtatcaccgacatcgagtttatcgcccaatatctggtgctgcgctttgcccatgacaagccgaaactgacgcgctggtcggataatgtgcgcattctcgaagggctggcgcaaaacggcatcatggaggagcaggaagcgcaggcattgacgctggcgtacaccacattgcgtgatgagctgcaccacctggcgctgcaagagttgccgggacatgtggcgctctcctgttttgtcgccgagcgtgcgcttattaaaaccagctgggacaagtggctggtggaa

SEQ ID NO: 239 - DNA, 2206 bp, Artificial Sequence
  Synthetic polynucleotide
  misc_feature (1)..(2206): glnE-delta-AR-2 with 500bp flank
gcgcaaagcgagtgctcacttacgtgatctgttgacacaatctgaagcgaccataacttctgccgtttcagcgaatacggcggtgtggagcgcacaatcagccctggcgaagctggtgctcaccgagtggctagtgacgcagggctggcgaaccttccttgatgaaaaagcgcaggccaaattcgccgactcctttaaacgctttgctgacatccatctgtcacgcagcgccgccgagctgaaaaaagcctttgcccaaccgctgggcgacagctatcgcgaccagttgccgcgcctggcgcgtgatatcgactgcgcgttactgctggccgggcattacgatcgcgcgcgcgccgtggaatggctggaaaactggcaggggcttcagcacgccattgaaacgcgccagagagtcgaaatcgaacatttccgtaataccgcgattacccaggagccgttctggttgcacagcggaaaacgttaacgaaaggatatttcgcatggcactgaaacacctcatttccctgtgtgccgcgtcgccgatggttgccagtcagctggcgcgctacccgatcctgcttgatgaattgctcgacccgaatacgctctatcaaccgacggcgatgaatgcctatcgcgatgagctgcgccaatacctgctgcgcgtgccggaagatgatgaagagcaacagcttgaggcgctgcggcagtttaagcaggcgcagttgctgcgcgtggcggcggcggatattgccggtacgttgccagtaatgaaagtgagcgatcacttaacctggctggcggaagcgattattgatgcggtggtgcagcaagcctgggggcagatggtggcgcgttatggccagccaacgcatctgcacgatcgcgaagggcgcggttttgcggtggtcggttatggcaagctgggcggctgggagctgggttacagctccgatctggatctggtattcctgcacgactgcccgatggatgtgatgaccgatggcgagcgtgaaatcgatggtcgccagttctatttgcgtctcgcgcagcgcgtgatgcacctgtttagcacgcgcacgtcgtccggcatcctttatgaagttgatgcgcgtctgcgtccatctggcgctgcggggatgctggtcactactacggaatcgttcgccgattaccagcaaaacgaagcctggacgtgggaacatcaggcgctggcccgtgcgcgcgtggtgtacggcgatccgcaactgaccgccgaatttgacgccattcgccgcgatattctgatgacgcctcgcgacggcgcaacgctgcaaaccgacgtgcgagaaatgcgcgagaaaatgcgtgcccatcttggcaacaagcataaagaccgcttcgatctgaaagccgatgaaggcggtatcaccgacatcgagtttatcgcccaatatctggtgctgcgctttgcccatgacaagccgaaactgacgcgctggtcggataatgtgcgcattctcgaagggctggcgcaaaacggcatcatggaggagcaggaagcgcaggcattgacgctggcgtacaccacattgcgtgatgagctgcaccacctggcgctgcaagagttgccgggacatgtggcgctctcctgttttgtcgccgagcgtgcgcttattaaaaccagctgggacaagtggctggtggaaccgtgcgccccggcgtaagtgtggtatcatcgcgcgcaaattttgtatctctcaggagacaggaatgaaagtgacgctgccagagtttaagcaagccggtgtaatggtggtgggtgatgtgatgctggatcgttactggtatggcccaaccagccgtatctctccggaagcgccagtcccggttgttaaagtcgataccattgaagagcgtcctggcggcgcggcaaacgtggcgatgaatatcgcctcactgggcgccacggcgcgtctggttggcctgactggcattgacgatgcggcgcgcgcgctgagcaaagcgctggccgatgttaacgttaaatgtgacttcgtttctgttccgacgcatcccaccatcactaagctgcgcgtgctgtcgcgtaaccagcagctgattcgcctggactttgaagagggttttgaaggagtcgatccgcaaccgatgcatgaacgcatcagccaggcgcttggtaatattggcgcgctggtgctgtcggatt

SEQ ID NO: 240 - DNA, 1563 bp, Artificial Sequence; identical to SEQ ID NO: 61
  Synthetic polynucleotide
  misc_feature (1)..(1563): glnE-delta-AR-1

SEQ ID NO: 241 - DNA, 461 bp, Artificial Sequence; identical to SEQ ID NO: 41
  Synthetic polynucleotide
  misc_feature (1)..(461): delta-nifL::Prm1

SEQ ID NO: 242 - DNA, 1461 bp, Artificial Sequence; identical to SEQ ID NO: 235
  Synthetic polynucleotide
  misc_feature (1)..(1461): delta-nifL::Prm1 with 500bp flank

SEQ ID NO: 243 - DNA, 2563 bp, Artificial Sequence
  Synthetic polynucleotide
  misc_feature (1)..(2563): glnE-delta-AR-1 with 500bp flank
gcgcaaagcgagtgctcacttacgtgatctgttgacacaatctgaagcgaccataacttctgccgtttcagcgaatacggcggtgtggagcgcacaatcagccctggcgaagctggtgctcaccgagtggctagtgacgcagggctggcgaaccttccttgatgaaaaagcgcaggccaaattcgccgactcctttaaacgctttgctgacatccatctgtcacgcagcgccgccgagctgaaaaaagcctttgcccaaccgctgggcgacagctatcgcgaccagttgccgcgcctggcgcgtgatatcgactgcgcgttactgctggccgggcattacgatcgcgcgcgcgccgtggaatggctggaaaactggcaggggcttcagcacgccattgaaacgcgccagagagtcgaaatcgaacatttccgtaataccgcgattacccaggagccgttctggttgcacagcggaaaacgttaacgaaaggatatttcgcatgtttaacgatctgattggcgatgatgaaacggattcgccggaagatgcgctttctgagagctggcgcgaattgtggcaggatgcgttgcaggaggaggattccacgcccgtgctggcgcatctctcagaggacgatcgccgccgcgtggtggcgctgattgccgattttcgcaaagagttggataaacgcaccattggcccgcgagggcggcaggtactcgatcacttaatgccgcatctgctcagcgatgtatgctcgcgcgacgatgcgccagtaccgctgtcacgcctgacgccgctgctcaccggaattattacccgcaccacttaccttgagctgctaagtgaatttcccggcgcactgaaacacctcatttccctgtgtgccgcgtcgccgatggttgccagtcagctggcgcgctacccgatcctgcttgatgaattgctcgacccgaatacgctctatcaaccgacggcgatgaatgcctatcgcgatgagctgcgccaatacctgctgcgcgtgccggaagatgatgaagagcaacagcttgaggcgctgcggcagtttaagcaggcgcagttgctgcgcgtggcggcggcggatattgccggtacgttgccagtaatgaaagtgagcgatcacttaacctggctggcggaagcgattattgatgcggtggtgcagcaagcctgggggcagatggtggcgcgttatggccagccaacgcatctgcacgatcgcgaagggcgcggttttgcggtggtcggttatggcaagctgggcggctgggagctgggttacagctccgatctggatctggtattcctgcacgactgcccgatggatgtgatgaccgatggcgagcgtgaaatcgatggtcgccagttctatttgcgtctcgcgcagcgcgtgatgcacctgtttagcacgcgcacgtcgtccggcatcctttatgaagttgatgcgcgtctgcgtccatctggcgctgcggggatgctggtcactactacggaatcgttcgccgattaccagcaaaacgaagcctggacgtgggaacatcaggcgctggcccgtgcgcgcgtggtgtacggcgatccgcaactgaccgccgaatttgacgccattcgccgcgatattctgatgacgcctcgcgacggcgcaacgctgcaaaccgacgtgcgagaaatgcgcgagaaaatgcgtgcccatcttggcaacaagcataaagaccgcttcgatctgaaagccgatgaaggcggtatcaccgacatcgagtttatcgcccaatatctggtgctgcgctttgcccatgacaagccgaaactgacgcgctggtcggataatgtgcgcattctcgaagggctggcgcaaaacggcatcatggaggagcaggaagcgcaggcattgacgctggcgtacaccacattgcgtgatgagctgcaccacctggcgctgcaagagttgccgggacatgtggcgctctcctgttttgtcgccgagcgtgcgcttattaaaaccagctgggacaagtggctggtggaaccgtgcgccccggcgtaagtgtggtatcatcgcgcgcaaattttgtatctctcaggagacaggaatgaaagtgacgctgccagagtttaagcaagccggtgtaatggtggtgggtgatgtgatgctggatcgttactggtatggcccaaccagccgtatctctccggaagcgccagtcccggttgttaaagtcgataccattgaagagcgtcctggcggcgcggcaaacgtggcgatgaatatcgcctcactgggcgccacggcgcgtctggttggcctgactggcattgacgatgcggcgcgcgcgctgagcaaagcgctggccgatgttaacgttaaatgtgacttcgtttctgttccgacgcatcccaccatcactaagctgcgcgtgctgtcgcgtaaccagcagctgattcgcctggactttgaagagggttttgaaggagtcgatccgcaaccgatgcatgaacgcatcagccaggcgcttggtaatattggcgcgctggtgctgtcggatt

SEQ ID NO: 244 - DNA, 1563 bp, Artificial Sequence; identical to SEQ ID NO: 61
  Synthetic polynucleotide
  misc_feature (1)..(1563): glnE-delta-AR-1

SEQ ID NO: 245 - DNA, 2563 bp, Artificial Sequence; identical to SEQ ID NO: 243
  Synthetic polynucleotide
  misc_feature (1)..(2563): glnE-delta-AR-1 with 500bp flank

SEQ ID NO: 246 - DNA, 426 bp, Artificial Sequence; identical to SEQ ID NO: 38
  Synthetic polynucleotide
  misc_feature (1)..(426): delta-nifL::Prm5

SEQ ID NO: 247 - DNA, 1426 bp, Artificial Sequence; identical to SEQ ID NO: 233
  Synthetic polynucleotide
  misc_feature (1)..(1426): delta-nifL::Prm5 with 500bp flank

SEQ ID NO: 248 - DNA, 461 bp, Artificial Sequence; identical to SEQ ID NO: 41
  Synthetic polynucleotide
  misc_feature (1)..(461): delta-nifL::Prm1

SEQ ID NO: 249 - DNA, 1461 bp, Artificial Sequence; identical to SEQ ID NO: 235
  Synthetic polynucleotide
  misc_feature (1)..(1461): delta-nifL::Prm1 with 500bp flank

SEQ ID NO: 250 - DNA, 1188 bp, Artificial Sequence; identical to SEQ ID NO: 238
  Synthetic polynucleotide
  misc_feature (1)..(1188): glnE-delta-AR-2

SEQ ID NO: 251 - DNA, 2206 bp, Artificial Sequence; identical to SEQ ID NO: 239
  Synthetic polynucleotide
  misc_feature (1)..(2206): glnE-delta-AR-2 with 500bp flank

SEQ ID NO: 252 - DNA, 199 bp, Artificial Sequence
  Synthetic polynucleotide
  misc_feature (1)..(199): delta-amtB
tttcgctgaaggtgtgaccatgggccatcaggtgctggtgcagctggaaagtgttgccatcactatcgtgtggtctggcgtggtggcctttattggttacaaactggcggacatgacggtaggcctgcgcgtaccggaagaacaagaacgtgaagggctggatgtaaacagccacggcgaaaacgcctataacgcctga

SEQ ID NO: 253 - DNA, 1199 bp, Artificial Sequence
  Synthetic polynucleotide
  misc_feature (1)..(1199): delta-amtB with 500bp flank
tttcctttctgactctgcccgtccgggcgcactaacggcctgaaatactccctcttttcattcctggcacaacgattgcaatgtctgttgcgtgttagctgcggccattatcgaattcgactggagggggatctatgaagctggttaccgtggtgattaagccattcaaacttgaagacgtgcgtgaagcgctttcttctattggtattcaagggttgaccgtaactgaagtgaaaggctttggccgtcagaagggtcacgctgagctgtaccgcggtgcggaatatagcgttaatttcctgccgaaagtgaaaattgatgtggcgatcgctgacgatcaactcgatgaagtaatcgatgtgatcagcaaagcggcctacaccggaaaaattggcgacggcaaaattttcgttgctgagctgcaacgcgtcattcgtattcgtaccggcgaagccgacgaagcggcactgtaatacaagacacacagtgatggggatcggtttcgctgaaggtgtgaccatgggccatcaggtgctggtgcagctggaaagtgttgccatcactatcgtgtggtctggcgtggtggcctttattggttacaaactggcggacatgacggtaggcctgcgcgtaccggaagaacaagaacgtgaagggctggatgtaaacagccacggcgaaaacgcctataacgcctgattgcgttgagttatctcctgagcataaaaaagcctccattcggaggcttttctttttttaagtttaaagcgcggttagttgcgattgcgcatgacgccttcctgcacgctggacgcgaccagcacaccctcttgcgtatagaactcgccgcgcacaaaaccgcgagcgctggaggctgacgtgctttccacactgtagagcagccattcgttcatattaaacgggcgatggaaccacatggagtggtcaatggtggcaacctgcataccgcgctcaaggaagcccacgccgtgcggctgaagtgcaaccggcaggaagttaaagtctgaggcatatccaagcagatattgatgtacgcgaaaatcgtccggcaccgtgccgtttgcgcggatccatacctggcgggtgggatcggcaacgtggcctttcagcgggttatgaaactcaaccgggcggatctccagtggtttatcactaagaaacttctctttggcctgcgg

SEQ ID NO: 254 - DNA, 1563 bp, Artificial Sequence; identical to SEQ ID NO: 61
  Synthetic polynucleotide
  misc_feature (1)..(1563): glnE-delta-AR-1

SEQ ID NO: 255 - DNA, 2563 bp, Artificial Sequence; identical to SEQ ID NO: 243
  Synthetic polynucleotide
  misc_feature (1)..(2563): glnE-delta-AR-1 with 500bp flank

SEQ ID NO: 256 - DNA, 461 bp, Artificial Sequence; identical to SEQ ID NO: 41
  Synthetic polynucleotide
  misc_feature (1)..(461): delta-nifL::Prm1

SEQ ID NO: 257 - DNA, 1461 bp, Artificial Sequence; identical to SEQ ID NO: 235
  Synthetic polynucleotide
  misc_feature (1)..(1461): delta-nifL::Prm1 with 500bp flank

SEQ ID NO: 258 - DNA, 199 bp, Artificial Sequence; identical to SEQ ID NO: 252
  Synthetic polynucleotide
  misc_feature (1)..(199): delta-amtB

SEQ ID NO: 259 - DNA, 1199 bp, Artificial Sequence; identical to SEQ ID NO: 253
  Synthetic polynucleotide
  misc_feature (1)..(258): delta-amtB with 500bp flank

SEQ ID NO: 260 - DNA, 607 bp, Artificial Sequence
  Synthetic polynucleotide
  misc_feature (1)..(607): delta-nifL::PinfC
atgacctttaatatgatgcctggggtcactggagcgctttatcggcatcctgaccgaagaatttgccggtttcttcccgacctggctggcccctgttcaggttgtggtgatgaatatcactgattctcaagctgaatatgtcaacgaattgacccgtaaattgcaaaatgcgggcattcgtgtaaaagcggacttgagaaacgagaagattggctttaaaatccgcgagcacactttacgtcgtgtcccttatatgttggtctgtggtgataaagaggtggaagcaggcaaagtggccgttcgcacccgccgcggtaaagacctgggcagcctggacgtaagtgaagtgattgagaagctgcaacaagagattcgcagccgcagtcttcaacaactggaggaataaggtattaaaggcggaaaacgagttcaaacggcacgtccgaatcgtatcaatggcgagattcgcgcccaggaagttcgcttaactggtctggaaggtgagcagctgggtattgcaatagaactaactacccgccctgaaggcggtacctgcctgaccctgcgattcccgttatttcattcactgaccggaggcccacgatga

SEQ ID NO: 261 - DNA, 1607 bp, Artificial Sequence
  Synthetic polynucleotide
  misc_feature (1)..(1607): delta-nifL::PinfC with 500bp flank
ggtacgacaaaaacgtctccagcgacgtgcggttaatattgactggcgcatccgccacatcccccagtttttgctggatcagtttggcgattttgcgggtttttcccgtgtcactgccaaaaaaaataccaatgttagccatgtcgcgctcctgttgagaaagaataaggccgcctgcaaacggcggatatcccttctcctgttgcgaaggctgtgccaggtttttttaaggccttctgtgcactgaaatgggtgaaaaaatgactcttttttgtgcaggcaccgtcctctctccgctatccagacctgctttgaaggcctctgagggccaaatcagggccaaaacacgaatcaggatcaatgtttcggcgcgttacctgttcgaaaggtgcactctttgcatggttaatcacacccaatcagggctgcggatgtcgggcgtttcacaacacaaaatgttgtaaatgcgacacagccgggcctgaaaccaggagcgtgtgatgacctttaatatgatgcctggggtcactggagcgctttatcggcatcctgaccgaagaatttgccggtttcttcccgacctggctggcccctgttcaggttgtggtgatgaatatcactgattctcaagctgaatatgtcaacgaattgacccgtaaattgcaaaatgcgggcattcgtgtaaaagcggacttgagaaacgagaagattggctttaaaatccgcgagcacactttacgtcgtgtcccttatatgttggtctgtggtgataaagaggtggaagcaggcaaagtggccgttcgcacccgccgcggtaaagacctgggcagcctggacgtaagtgaagtgattgagaagctgcaacaagagattcgcagccgcagtcttcaacaactggaggaataaggtattaaaggcggaaaacgagttcaaacggcacgtccgaatcgtatcaatggcgagattcgcgcccaggaagttcgcttaactggtctggaaggtgagcagctgggtattgcaatagaactaactacccgccctgaaggcggtacctgcctgaccctgcgattcccgttatttcattcactgaccggaggcccacgatgacccagcgacccgagtcgggcaccaccgtctggcgttttgatctctcacagcaatttaccgccatgcagcgcatcagcgtggtgttgagtcgcgcaaccgagataagccagacgctgcaggaggtgctgtgtgttctgcataatgacgcatttatgcaacacggcatgctgtgtctgtatgacaaccagcaggaaattctgagtattgaagccttgcaggaggcagaccaacatctgatccccggcagctcgcaaattcgctatcgccctggcgaagggctggtaggagccgtactgtcccagggacaatctcttgtgctgccgcgtgtcgccgacgatcaacgctttctcgacaggcttggcatctatgattacaacctgccgtttatcgccgtccccttaatggggccaggcgcgcagacgattggcgtgctcgccgcgcagccgatggcgcgtctggaggagcggcttccttcctgtacgcgctttctggaaaccgtc

SEQ ID NO: 262 - DNA, 1536 bp, Kosakonia sacchari; identical to SEQ ID NO: 62
  gene (1)..(1536): 16S-1

SEQ ID NO: 263 - DNA, 1537 bp, Kosakonia sacchari; identical to SEQ ID NO: 63
  gene (1)..(1537): 16S-2
  misc_feature (450)..(450): n is a, c, t, g, unknown or other
  misc_feature (452)..(452): n is a, c, t, g, unknown or other
  misc_feature (455)..(455): n is a, c, t, g, unknown or other
  misc_feature (473)..(473): n is a, c, t, g, unknown or other

SEQ ID NO: 264 - DNA, 882 bp, Kosakonia sacchari; identical to SEQ ID NO: 65
  gene (1)..(882): nifH

SEQ ID NO: 265 - DNA, 1449 bp, Kosakonia sacchari; identical to SEQ ID NO: 66
  gene (1)..(1449): nifD2

SEQ ID NO: 266 - DNA, 1563 bp, Kosakonia sacchari; identical to SEQ ID NO: 67
  gene (1)..(1563): nifK2

SEQ ID NO: 267 - DNA, 1488 bp, Kosakonia sacchari; identical to SEQ ID NO: 68
  gene (1)..(1488): nifL

SEQ ID NO: 268 - DNA, 1575 bp, Kosakonia sacchari; identical to SEQ ID NO: 69
  gene (1)..(1575): nifA

SEQ ID NO: 269 - DNA, 2850 bp, Kosakonia sacchari; identical to SEQ ID NO: 79
  gene (1)..(2850): glnE

SEQ ID NO: 270 - DNA, 1536 bp, Kosakonia sacchari
  gene (1)..(1536): 16S-3
  misc_feature (766)..(776): n is a, c, t, g, unknown or other
  misc_feature (905)..(905): n is a, c, t, g, unknown or other
attgaagagtttgatcatggctcagattgaacgctggcggcaggcctaacacatgcaagtcgaacggtagcacagagagcttgctctcgggtgacgagtggcggacgggtgagtaatgtctgggaaactgcctgatggagggggataactactggaaacggtagctaataccgcataacgtcgcaagaccaaagagggggaccttcgggcctcttgccatcagatgtgcccagatgggattagctagtaggtggggtaacggctcacctaggcgacgatccctagctggtctgagaggatgaccagccacactggaactgagacacggtccagactcctacgggaggcagcagtggggaatattgcacaatgggcgcaagcctgatgcagccatgccgcgtgtgtgaagaaggccttcgggttgtaaagcactttcagcggggaggaagggagtaaggttaataaccttgctcattgacgttacccgcagaagaagcaccggctaactccgtgccagcagccgcggtaatacggagggtgcaagcgttaatcggaattactgggcgtaaagcgcacgcaggcggtctgtcaagtcggatgtgaaatccccgggctcaacctgggaactgcatccgaaactggcaggcttgagtctcgtagagggaggtagaattccaggtgtagcggtgaaatgcgtagagatctggaggaataccggtggcgaaggcggcctcctggacgaagactgacgctcaggtgcgaaagnnnnnnnnnnnaacaggattagataccctggtagtccatgccgtaaacgatgtctactagccgttggggcctttgaggctttagtggcgcagctaacgcgataagtagaccgcctggggagtacggtcgcaagactaaanctcaaatgaattgacgggggcccgcacaagcggtggagcatgtggtttaattcgatgcaacgcgaagaaccttacctggccttgacatagtaagaattttccagagatggattggtgccttcgggaacttacatacaggtgctgcatggctgtcgtcagctcgtgtcgtgagatgttgggttaagtcccgcaacgagcgcaacccttgtcattagttgctacatttagttgggcactctaatgagactgccggtgacaaaccggaggaaggtggggatgacgtcaagtcctcatggcccttataggtggggctacacacgtcatacaatggctggtacaaagggttgccaacccgcgagggggagctaatcccataaaaccagtcgtagtccggatcgcagtctgcaactcgactgcgtgaagtcggaatcgctagtaatcgtggatcagaatgtcacggtgaatacgttcccgggtcttgtacacaccgcccgtcacaccatgggagcgggttctgccagaagtagttagcttaaccgcaaggagggcgattaccacggcagggttcgtgactggggtgaagtcgtaacaaggtagccgtatcggaaggtgcggctggatcacctccttt

SEQ ID NO: 271 - DNA, 882 bp, Kosakonia sacchari; identical to SEQ ID NO: 65
  gene (1)..(882): nifD1

SEQ ID NO: 272 - DNA, 1386 bp, Kosakonia sacchari
  gene (1)..(1386): nifK1
atggccgaaattctgcgcagtaaaaaaccgctggcggtcagcccgataaaaagcggccagccgctgggggcgatcctcgcaagcctgggtgtcgaacagtgcataccgctggtacacggcgcacagggatgtagcgcgttcgcgaaggtgttctttattcaacattttcacgatccgatcccgctgcaatcgacggcgatggatccgacttccaccattatgggcgccgatgaaaacatttttaccgcgctcaatgtgctctgccagcgcaacgccgcgaaagccattgtgctgctcagcaccgggctttcagaagcccagggcagcgacatttcgcgggtggtgcgccagtttcgtgatgattttccccggcataaaggcgttgcgctgctcaccgtcaacacacccgatttctacggctcgctggaaaacggctacagcgccgtgctggaaagcatgattgaacagtgggtacccgcacagcccgccgccagcctgcgcaaccgccgtgtcaacctgctggtcagccatttactgacaccaggcgatatcgaactgttgcgcagttatgttgaagccttcggcctgcaaccggtgattgtgccggatctgtcgctgtcgctggacgggcatctggcagacggtgatttttcgcctgttacccaagggggaacatcgctgcgcatgattgaacagatggggcaaaacctggccacctttgtgattggcgcctcgctgggccgtgcggcggcgttactggcgcagcgcagccgtggcgaggtgatcgccctgccgcatctgatgacgcttgcagcctgcgacacgtttattcatcgactgaaaaccctctccgggcgcgatgtccccgcgtggattgagcgccagcgcggccaagttcaggatgcgatgatcgattgccatatgtggctgcagggtgcggctatcgccatggcagcagaaggcgatcacctggcggcatggtgcgatttcgcccgcagccagggcatgatccccggcccgattgtcgcaccggtcagccagccggggttgcaaaatctgccggttgaaaccgtggttatcggcgatctggaagatatgcaggatcggctttgcgcgacgcccgccgcgttactggtggccaattctcatgccgccgatctcgccacgcagtttgatttgtcacttatccgcgccgggttcccggtgtatgaccggctgggggaatttcgtcgcctgcgccaggggtacagcggcattcgtgacacgctgtttgagctggcgaatgtgatgcgcgagcgccatcacccgcttgcaacctaccgctcgccgctgcgccagcacgccgacgacaacgttacgcctggagatctgtatgccgcatgttaa

SEQ ID NO: 273 - DNA, 1287 bp, Kosakonia sacchari
  gene (1)..(1287): amtB
atgaaaaacacaacattaaaaacagcgcttgcttcgctggcgttactgcctggcctggcgatggcggctcccgctgtggcggataaagccgacaacggctttatgatgatttgcaccgcgctggtgctgtttatgaccattccgggcattgcgctgttctacggcggtttgatccgcggtaaaaacgtgctgtcgatgctgacgcaggttgccgtcaccttcgcactggtgtgcattctgtgggtggtgtatggctactcgctggcatttggcgagggcaacagcttcttcgggagttttaactgggcgatgttgaaaaacatcgaactgaaagccgtgatgggcagcatttatcagtatatccacgtggcgttccagggttccttcgcctgtatcaccgttggcctgattgtcggtgcactggctgagcgtattcgcttctctgcggtgctgatttttgtggtggtatggctgacgctttcttacgtgccgattgcacacatggtgtggggcggcggtctgctggcaacccacggtgcgctggatttcgcaggcggtacggttgttcacatcaacgctgcgattgcaggtctggtgggggcttacctgattggcaaacgcgtgggctttggcaaagaagcattcaaaccgcataacctgccgatggtcttcactggcaccgctatcctgtatgttggctggtttggtttcaacgccggctccgcaagctcggcgaacgaaattgctgcgctggccttcgtgaacactgtcgttgccactgctgccgctattctggcgtgggtatttggcgaatgggcaatgcgcggcaagccgtctctgctcggtgcctgttctggtgccatcgcgggtctggttggtatcacccccgcctgtggttatgtgggtgtcggcggtgcgctgattgtgggtctgattgccggtctggctgggctgtggggcgttactgcgctgaaacgtatgttgcgtgtcgatgacccgtgtgacgtattcggtgtgcacggcgtgtgcggcatcgtgggctgtatcctgacgggtatcttcgcctctacgtcgctgggtggtgtcggtttcgctgaaggtgtgaccatgggccatcaggtgctggtgcagctggaaagtgttgccatcactatcgtgtggtctggcgtggtggcctttattggttacaaactggcggacatgacggtaggcctgcgcgtaccggaagaacaagaacgtgaagggctggatgtaaacagccacggcgaaaacgcctataacgcctga

SEQ ID NO: 274 - DNA, 348 bp, Kosakonia sacchari
  gene (1)..(348): Prm1
cgtcctgtaataataaccggacaattcggactgattaaaaaagcgcccttgtggcgctttttttatattcccgcctccatttaaaataaaaaatccaatcggatttcactatttaaactggccattatctaagatgaatccgatggaagctcgctgttttaacacgcgttttttaaccttttattgaaagtcggtgcttctttgagcgaacgatcaaatttaagtggattcccatcaaaaaaatattctcaacctaaaaaagtttgtgtaatacttgtaacgctacatggagattaactcaatctagagggtattaataatgaatcgtactaaactggtactgggcgc

SEQ ID NO: 275 - DNA, 313 bp, Kosakonia sacchari
  gene (1)..(313): Prm5
ggacatcatcgcgacaaacaatattaataccggcaaccacaccggcaatttacgagactgcgcaggcatcctttctcccgtcaatttctgtcaaataaagtaaaagaggcagtctacttgaattacccccggctggttgagcgtttgttgaaaaaaagtaactgaaaaatccgtagaatagcgccactctgatggttaattaacctattcaattaagaattatctggatgaatgtgccattaaatgcgcagcataatggtgcgttgtgcgggaaaactgcttttttttgaaagggttggtcagtagcggaaac

SEQ ID NO: 276 - DNA, 1485 bp, Rahnella aquatilis; identical to SEQ ID NO: 103
  gene (1)..(1485): nifL

SEQ ID NO: 277 - DNA, 1575 bp, Rahnella aquatilis; identical to SEQ ID NO: 104
  gene (1)..(1575): nifA

SEQ ID NO: 278 - DNA, 1540 bp, Rahnella aquatilis
  gene (1)..(1540): 16S-1
attgaagagtttgatcatggctcagattgaacgctggcggcaggcctaacacatgcaagtcgagcggcagcgggaagtagcttgctactttgccggcgagcggcggacgggtgagtaatgtctgggaaactgcctgatggagggggataactactggaaacggtagctaataccgcatgacctcgaaagagcaaagtgggggatcttcggacctcacgccatcggatgtgcccagatgggattagctagtaggtgaggtaatggctcacctaggcgacgatccctagctggtctgagaggatgaccagccacactggaactgagacacggtccagactcctacgggaggcagcagtggggaatattgcacaatgggcgcaagcctgatgcagccatgccgcgtgtgtgaagaaggccttagggttgtaaagcactttcagcgaggaggaaggcatcatacttaatacgtgtggtgattgacgttactcgcagaagaagcaccggctaactccgtgccagcagccgcggtaatacggagggtgcaagcgttaatcggaattactgggcgtaaagcgcacgcaggcggtttgttaagtcagatgtgaaatccccgagcttaacttgggaactgcatttgaaactggcaagctagagtcttgtagaggggggtagaattccaggtgtagcggtgaaatgcgtagagatctggaggaataccggtggcgaaggcggccccctggacaaagactgacgctcaggtgcgaaagcgtggggagcaaacaggattagataccctggtagtccacgctgtaaacgatgtcgacttggaggttgtgcccttgaggcgtggcttccggagctaacgcgttaagtcgaccgcctggggagtacggccgcaaggttaaaactcaaatgaattgacgggggcccgcacaagcggtggagcatgtggtttaattcgatgcaacgcgaagaaccttacctactcttgacatccagagaatttgccagagatggcgaagtgccttcgggaactctgagacaggtgctgcatggctgtcgtcagctcgtgttgtgaaatgttgggttaagtcccgcaacgagcgcaacccttatcctttgttgccagcacgtaatggtgggaactcaaaggagactgccggtgataaaccggaggaaggtggggatgacgtcaagtcatcatggcccttacgagtagggctacacacgtgctacaatggcatatacaaagagaagcgaactcgcgagagcaagcggacctcataaagtatgtcgtagtccggattggagtctgcaactcgactccatgaagtcggaatcgctagtaatcgtagatcagaatgctacggtgaatacgttcccgggccttgtacacaccgcccgtcacaccatgggagtgggttgcaaaagaagtaggtagcttaaccttcgggagggcgcttaccactttgtgattcatgactggggtgaagtcgtaacaaggtaaccgtaggggaacctgcggttggatcacctcctt

SEQ ID NO: 279 - DNA, 1540 bp, Rahnella aquatilis
  gene (1)..(1540): 16S-2
  misc_feature (267)..(267): n is a, c, t, g, unknown or other
attgaagagtttgatcatggctcagattgaacgctggcggcaggcctaacacatgcaagtcgagcggcatcgggaagtagcttgctactttgccggcgagcggcggacgggtgagtaatgtctgggaaactgcctgatggagggggataactactggaaacggtagctaataccgcatgacctcgaaagagcaaagtgggggatcttcggacctcacgccatcggatgtgcccagatgggattagctagtaggtgaggtaatggctnacctaggcgacgatccctagctggtctgagaggatgaccagccacactggaactgagacacggtccagactcctacgggaggcagcagtggggaatattgcacaatgggcgcaagcctgatgcagccatgccgcgtgtgtgaagaaggccttagggttgtaaagcactttcagcgaggaggaaggcatcatacttaatacgtgtggtgattgacgttactcgcagaagaagcaccggctaactccgtgccagcagccgcggtaatacggagggtgcaagcgttaatcggaattactgggcgtaaagcgcacgcaggcggtttgttaagtcagatgtgaaatccccgagcttaacttgggaactgcatttgaaactggcaagctagagtcttgtagaggggggtagaattccaggtgtagcggtgaaatgcgtagagatctggaggaataccggtggcgaaggcggccccctggacaaagactgacgctcaggtgcgaaagcgtggggagcaaacaggattagataccctggtagtccacgctgtaaacgatgtcgacttggaggttgtgcccttgaggcgtggcttccggagctaacgcgttaagtcgaccgcctggggagtacggccgcaaggttaaaactcaaatgaattgacgggggcccgcacaagcggtggagcatgtggtttaattcgatgcaacgcgaagaaccttacctactcttgacatccagagaatttgccagagatggcgaagtgccttcgggaactctgagacaggtgctgcatggctgtcgtcagctcgtgttgtgaaatgttgggttaagtcccgcaacgagcgcaacccttatcctttgttgccagcacgtgatggtgggaactcaaaggagactgccggtgataaaccggaggaaggtggggatgacgtcaagtcatcatggcccttacgagtagggctacacacgtgctacaatggcatatacaaagagaagcgaactcgcgagagcaagcggacctcataaagtatgtcgtagtccggattggagtctgcaactcgactccatgaagtcggaatcgctagtaatcgtagatcagaatgctacggtgaatacgttcccgggccttgtacacaccgcccgtcacaccatgggagtgggttgcaaaagaagtaggtagcttaaccttcgggagggcgcttaccactttgtgattcatgactggggtgaagtcgtaacaaggtaaccgtaggggaacctgcggttggatcacctcctt

SEQ ID NO: 280 - DNA, 1540 bp, Rahnella aquatilis
  gene (1)..(1540): 16S-3
  misc_feature (455)..(455): n is a, c, t, g, unknown or other
attgaagagtttgatcatggctcagattgaacgctggcggcaggcctaacacatgcaagtcgagcggcagcgggaagtagcttgctactttgccggcgagcggcggacgggtgagtaatgtctgggaaactgcctgatggagggggataactactggaaacggtagctaataccgcatgacctcgaaagagcaaagtgggggatcttcggacctcacgccatcggatgtgcccagatgggattagctagtaggtgaggtaatggctcacctaggcgacgatccctagctggtctgagaggatgaccagccacactggaactgagacacggtccagactcctacgggaggcagcagtggggaatattgcacaatgggcgcaagcctgatgcagccatgccgcgtgtgtgaagaaggccttagggttgtaaagcactttcagcgaggaggaaggcancatacttaatacgtgtggtgattgacgttactcgcagaagaagcaccggctaactccgtgccagcagccgcggtaatacggagggtgcaagcgttaatcggaattactgggcgtaaagcgcacgcaggcggtttgttaagtcagatgtgaaatccccgagcttaacttgggaactgcatttgaaactggcaagctagagtcttgtagaggggggtagaattccaggtgtagcggtgaaatgcgtagagatctggaggaataccggtggcgaaggcggccccctggacaaagactgacgctcaggtgcgaaagcgtggggagcaaacaggattagataccctggtagtccacgctgtaaacgatgtcgacttggaggttgtgcccttgaggcgtggcttccggagctaacgcgttaagtcgaccgcctggggagtacggccgcaaggttaaaactcaaatgaattgacgggggcccgcacaagcggtggagcatgtggtttaattcgatgcaacgcgaagaaccttacctactcttgacatccagagaatttgccagagatggcgaagtgccttcgggaactctgagacaggtgctgcatggctgtcgtcagctcgtgttgtgaaatgttgggttaagtcccgcaacgagcgcaacccttatcctttgttgccagcacgtgatggtgggaactcaaaggagactgccggtgataaaccggaggaaggtggggatgacgtcaagtcatcatggcccttacgagtagggctacacacgtgctacaatggcatatacaaagagaagcgaactcgcgagagcaagcggacctcataaagtatgtcgtagtccggattggagtctgcaactcgactccatgaagtcggaatcgctagtaatcgtagatcagaatgctacggtgaatacgttcccgggccttgtacacaccgcccgtcacaccatgggagtgggttgcaaaagaagtaggtagcttaaccttcgggagggcgcttaccactttgtgattcatgactggggtgaagtcgtaacaaggtaaccgtaggggaacctgcggttggatcacctcctt

SEQ ID NO: 281 - DNA, 1540 bp, Rahnella aquatilis
  gene (1)..(1540): 16S-4
  misc_feature (70)..(70): n is a, c, t, g, unknown or other
attgaagagtttgatcatggctcagattgaacgctggcggcaggcctaacacatgcaagtcgagcggcancgggaagtagcttgctactttgccggcgagcggcggacgggtgagtaatgtctgggaaactgcctgatggagggggataactactggaaacggtagctaataccgcatgacctcgaaagagcaaagtgggggatcttcggacctcacgccatcggatgtgcccagatgggattagctagtaggtgaggtaatggcttacctaggcgacgatccctagctggtctgagaggatgaccagccacactggaactgagacacggtccagactcctacgggaggcagcagtggggaatattgcacaatgggcgcaagcctgatgcagccatgccgcgtgtgtgaagaaggccttagggttgtaaagcactttcagcgaggaggaaggcatcacacttaatacgtgtggtgattgacgttactcgcagaagaagcaccggctaactccgtgccagcagccgcggtaatacggagggtgcaagcgttaatcggaattactgggcgtaaagcgcacgcaggcggtttgttaagtcagatgtgaaatccccgagcttaacttgggaactgcatttgaaactggcaagctagagtcttgtagaggggggtagaattccaggtgtagcggtgaaatgcgtagagatctggaggaataccggtggcgaaggcggccccctggacaaagactgacgctcaggtgcgaaagcgtggggagcaaacaggattagataccctggtagtccacgctgtaaacgatgtcgacttggaggttgtgcccttgaggcgtggcttccggagctaacgcgttaagtcgaccgcctggggagtacggccgcaaggttaaaactcaaatgaattgacgggggcccgcacaagcggtggagcatgtggtttaattcgatgcaacgcgaagaaccttacctactcttgacatccagagaatttgccagagatggcgaagtgccttcgggaactctgagacaggtgctgcatggctgtcgtcagctcgtgttgtgaaatgttgggttaagtcccgcaacgagcgcaacccttatcctttgttgccagcacgtgatggtgggaactcaaaggagactgccggtgataaaccggaggaaggtggggatgacgtcaagtcatcatggcccttacgagtagggctacacacgtgctacaatggcatatacaaagagaagcgaactcgcgagagcaagcggacctcataaagtatgtcgtagtccggattggagtctgcaactcgactccatgaagtcggaatcgctagtaatcgtagatcagaatgctacggtgaatacgttcccgggccttgtacacaccgcccgtcacaccatgggagtgggttgcaaaagaagtaggtagcttaaccttcgggagggcgcttaccactttgtgattcatgactggggtgaagtcgtaacaaggtaaccgtaggggaacctgcggttggatcacctcctt

SEQ ID NO: 282 - DNA, 1540 bp, Rahnella aquatilis
  gene (1)..(1540): 16S-5
attgaagagtttgatcatggctcagattgaacgctggcggcaggcctaacacatgcaagtcgagcggcagcgggaagtagcttgctactttgccggcgagcggcggacgggtgagtaatgtctgggaaactgcctgatggagggggataactactggaaacggtagctaataccgcatgacctcgaaagagcaaagtgggggatcttcggacctcacgccatcggatgtgcccagatgggattagctagtaggtgaggtaatggctcacctaggcgacgatccctagctggtctgagaggatgaccagccacactggaactgagacacggtccagactcctacgggaggcagcagtggggaatattgcacaatgggcgcaagcctgatgcagccatgccgcgtgtgtgaagaaggccttagggttgtaaagcactttcagcgaggaggaaggcatcacacttaatacgtgtgttgattgacgttactcgcagaagaagcaccggctaactccgtgccagcagccgcggtaatacggagggtgcaagcgttaatcggaattactgggcgtaaagcgcacgcaggcggtttgttaagtcagatgtgaaatccccgagcttaacttgggaactgcatttgaaactggcaagctagagtcttgtagaggggggtagaattccaggtgtagcggtgaaatgcgtagagatctggaggaataccggtggcgaaggcggccccctggacaaagactgacgctcaggtgcgaaagcgtggggagcaaacaggattagataccctggtagtccacgctgtaaacgatgtcgacttggaggttgtgcccttgaggcgtggcttccggagctaacgcgttaagtcgaccgcctggggagtacggccgcaaggttaaaactcaaatgaattgacgggggcccgcacaagcggtggagcatgtggtttaattcgatgcaacgcgaagaaccttacctactcttgacatccagagaatttgccagagatggcgaagtgccttcgggaactctgagacaggtgctgcatggctgtcgtcagctcgtgttgtgaaatgttgggttaagtcccgcaacgagcgcaacccttatcctttgttgccagcacgtgatggtgggaactcaaaggagactgccggtgataaaccggaggaaggtggggatgacgtcaagtcatcatggcccttacgagtagggctacacacgtgctacaatggcatatacaaagagaagcgaactcgcgagagcaagcggacctcataaagtatgtcgtagtccggattggagtctgcaactcgactccatgaagtcggaatcgctagtaatcgtagatcagaatgctacggtgaatacgttcccgggccttgtacacaccgcccgtcacaccatgggagtgggttgcaaaagaagtaggtagcttaaccttcgggagggcgcttaccactttgtgattcatgactggggtgaagtcgtaacaaggtaaccgtaggggaacctgcggttggatcacctcctt

SEQ ID NO: 283 - DNA, 1009 bp, Rahnella aquatilis
  gene (1)..(1009): 16S-6
  misc_feature (296)..(296): n is a, c, t, g, unknown or other
  misc_feature (311)..(311): n is a, c, t, g, unknown or other
  misc_feature (973)..(973): n is a, c, t, g, unknown or other
gtagctaataccgcatgacctcgaaagagcaaagtgggggatcttcggacctcacgccatcggatgtgcccagatgggattagctagtaggtgaggtaatggctcacctaggcgacgatccctagctggtctgagaggatgaccagccacactggaactgagacacggtccagactcctacgggaggcagcagtggggaatattgcacaatgggcgcaagcctgatgcagccatgccgcgtgtgtgaagaaggccttagggttgtaaagcactttcagcgaggaggaaggcatcanacttaatacgtgtgntgattgacgttactcgcagaagaagcaccggctaactccgtgccagcagccgcggtaatacggagggtgcaagcgttaatcggaattactgggcgtaaagcgcacgcaggcggtttgttaagtcagatgtgaaatccccgagcttaacttgggaactgcatttgaaactggcaagctagagtcttgtagaggggggtagaattccaggtgtagcggtgaaatgcgtagagatctggaggaataccggtggcgaaggcggccccctggacaaagactgacgctcaggtgcgaaagcgtggggagcaaacaggattagataccctggtagtccacgctgtaaacgatgtcgacttggaggttgtgcccttgaggcgtggcttccggagctaacgcgttaagtcgaccgcctggggagtacggccgcaaggttaaaactcaaatgaattgacgggggcccgcacaagcggtggagcatgtggtttaattcgatgcaacgcgaagaaccttacctactcttgacatccagagaatttgccagagatggcgaagtgccttcgggaactctgagacaggtgctgcatggctgtcgtcagctcgtgttgtgaaatgttgggttaagtcccgcaacgagcgcaacccttatcctttgttgccagcacgtnatggtgggaactcaaaggagactgccggtgataaac

SEQ ID NO: 284 - DNA, 1519 bp, Rahnella aquatilis
  gene (1)..(1519): 16S-7
attgaagagtttgatcatggctcagattgaacgctggcggcaggcctaacacatgcaagtcgagcggcagcgggaagtagcttgctactttgccggcgagcggcggacgggtgagtaatgtcctgatggaggggataactactggaacggtagctaataccgcacctcgaaagagcaaagtgggggatcttcggacctcacgccatcggatgtgcccagatgggattagctagtaggtgaggtaatggctcacctaggcgacgatccctagctggtctgagaggatgaccagccacactggaactgagacacggtccagactcctacgggaggcagcagtggggaatattgcacaatgggcgcaagcctgatgcagccatgccgcgtgtgtgaagaaggccttagggttgtaaagcactttcagcgaggaggaaggcatcatacttaatacgtgtggtgattgacgttactcgcagaagaagcaccggctaactccgtgccagcagccgcggtaatacggagggtgcaagcttaatcggaattactgggcgtaaagcgcacgcaggcggttgttaagtcagatgtgaaatccccgagcttaacttgggaactgcatttgaaactggcaagctagagtcttgtagaggggggtagaattccaggtgtagcggtgaaatgcgtagagatctggaggaataccggtggcgaaggcggccccctggacaaagactgacgctcaggtgcgaaagcgtggggagcaaacaggattaataccctggtagtccacgctgtaacgatgtcgacttggaggttgtgccctgaggcgtggcttccggagctaacgcgttaagtcgaccgcctggggagtacggccgcaaggttaaaactcaaatgaattgacgggggcccgcacaagcggtggagcatgtggtttaattcgatgcaacgcgaagaaccttacctactcttgacatccagagaatttgccagagatggcgaagtgccttcgggaactctgagacaggtgctgcatggctgtcgtcagctcgtgttgtgaaatgttgggttaagtcccgcaacgagcgcaacccttatcctttgttgccagcacgtaatggtgggaactcaaaggagactgccggtgataaaccggaggaaggtggggatgacgtcaagtcatcatggcccttacgagtagggctacacacgtgctacaatggcatatacaaagagaagcgaactcgcgagagcaagcggacctcataaagtatgtcgtagtccggattggagtctgcaactcgactccatgaagtcggaatcgctagtaatcgtagatcagaatgctacggtgaatacgttcccgggccttgtacacaccgcccgtcacaccatgggagtgggttgcaaaagaagtaggtagcttaaccttcgggagggcgcttaccactttgtgattcatgactggggtgaagtcgtaacaaggtaaccgtaggggaacctgcggttggatcacctcctt

SEQ ID NO: 285 - DNA, 882 bp, Rahnella aquatilis; identical to SEQ ID NO: 97
  gene (1)..(882): nifH1

SEQ ID NO: 286 - DNA, 1113 bp, Rahnella aquatilis; identical to SEQ ID NO: 98
  gene (1)..(1113): nifH2

SEQ ID NO: 287 - DNA, 1374 bp, Rahnella aquatilis; identical to SEQ ID NO: 99
  gene (1)..(1374): nifD1

SEQ ID NO: 288 - DNA, 1449 bp, Rahnella aquatilis; identical to SEQ ID NO: 100
  gene (1)..(1449): nifD2

SEQ ID NO: 289 - DNA, 1386 bp, Rahnella aquatilis; identical to SEQ ID NO: 101
  gene (1)..(1386): nifK1

SEQ ID NO: 290 - DNA, 1563 bp, Rahnella aquatilis; identical to SEQ ID NO: 102
  gene (1)..(1563): nifK2

SEQ ID NO: 291 - DNA, 2838 bp, Rahnella aquatilis; identical to SEQ ID NO: 105
  gene (1)..(2838): glnE

SEQ ID NO: 292 - DNA, 449 bp, Rahnella aquatilis
  gene (1)..(449): Prm4
agtctgaactcatcctgcggcagtcggtgagacgtatttttgaccaaagagtgatctacatcacggaattttgtggttgttgctgcttaaaagggcaaatctacccttagaatcaactgttatatcagggggattcagagagatattaggaatttgcacaagcgcacaatttaaccacatcatgataacgccatgtaaaacaaagataaaaaaacaaaatgcagtgacttacatcgcaagcaaggcattttcttatccaattgctcaaagtttggcctttcatatcgcaacgaaaatgcgtaatatacgcgcccttgcggacatcagtatggtcattcctagttcatgcgcatcggacaccaccagcttacaaattgcctgattgcggccccgatggccggtatcactgaccgaccatttcgtgccttatgtcatgcgatgggggctgg

SEQ ID NO: 293 - DNA, 500 bp, Rahnella aquatilis
  gene (1)..(500): Prm1.2
tgaacatcactgatgcacaagctacctatgtcgaagaattaactaaaaaactgcaagatgcaggcattcgcgttaaagccgacttgagaaatgagaagattggctttaaaattcgcgaacacacgctacgccgtgttccttatatgttagtttgtggcgataaagaggtcgaagcaggcaaagttgctgttcgtacccgccgcggcaaagacttaggaagcatggatgttagcgaagtcgttgacaaactgctggcggaaatccgcagcagaagtcttcatcaactggaggaataaagtattaaaggcggaaaacgagttcaaccggcgcgtcctaatcgcattaacaaagagattcgcgcgcaagaagttcgcctcacaggcgtcgatggcgagcagattggtattgtcagtctgaatgaagctcttgaaaaagctgaggaagcgggcgtcgatttagtagaaatcagtccgaatgccgagccgccagtttgtcgaatc

SEQ ID NO: 294 - DNA, 170 bp, Rahnella aquatilis
  gene (1)..(170): Prm3.1
tacagtagcgcctctcaaaaatagataaacggctcatgtacgtgggccgtttattttttctacccataatcgggaaccggtgttataatgccgcgccctcatattgtggggatttcttaatgacctatcctgggtcctaaagttgtagttgacattagcggagcactaac

SEQ ID NO: 295 - DNA, 142 bp, Rahnella aquatilis
  gene (1)..(142): Prm6.1
aattttttttcacaaagcgtagcgttattgaatcgcacattttaaactgttggccgctgtggaagcgaatattggtgaaaggtgcggttttaaggcctttttctttgactctctgtcgttacaaagttaatatgcgcgccct

SEQ ID NO: 296 - DNA, 293 bp, Rahnella aquatilis
  gene (1)..(293): Prm7.1
ttaaaaacgtgaccacgagcattaataaacgccacgaaatgtggcgtttatttattcaaaaagtatcttctttcataaaaagtgctaaatgcagtagcagcaaaattgggataagtcccatggaatacggctgttttcgctgcaatttttaactttttcgtaaaaaaagatgtttctttgagcgaacgatcaaaatatagcgttaaccggcaaaaaattattctcattagaaaatagtttgtgtaatacttgtaacgctacatggagattaacttaatctagagggttttata

SEQ ID NO: 297 - DNA, 1188 bp, Artificial Sequence; identical to SEQ ID NO: 212
  Synthetic polynucleotide
  misc_feature (1)..(1188): glnE-delta-AR-2

SEQ ID NO: 298 - DNA, 2188 bp, Artificial Sequence; identical to SEQ ID NO: 213
  Synthetic polynucleotide
  misc_feature (1)..(2188): glnE-delta-AR-2 with 500bp flank

SEQ ID NO: 299 - DNA, 524 bp, Artificial Sequence
  Synthetic polynucleotide
  misc_feature (1)..(524): delta-nifL::null-v1
atgagcatcacggcgttatcagcatcatttcctgaggggaatatcgccagccgcttgtcgctgcaacatccttcactgttttataccgtggttgaacaatcttcggtggcgatttcgctgaccgatccgcaggcgcgcatttgttatgccaatccggcattctgccgccagacgggttttgcacttgagacacttttgggcgagaaccaccgtctgctggagtctgaactcatcctgcgatgggggctgggccgtctctgaagctctcggtgaacattgttgcgaggcaggatgcgagctggttgtgttttgacattaccgataatgtgccgcgtgaacgggtgcgttatgcccgcccggaagcggcgttttcccgtccggggaatggcatggagctgcgccttatccagacgctgatcgcccatcatcgcggttctttagatctctcggtccgccctgatggcggcaccttgctgacgttacgcctgccggtacagcaggttatcaccggaggcttaaaatga

SEQ ID NO: 300 - DNA, 1524 bp, Artificial Sequence
  Synthetic polynucleotide
  misc_feature (1)..(1524): delta-nifL::null-v1 with 500bp flank
tgtttcgtctcgaggccgggcaactgagcggccccgttgaaaccgacctgggctggcatctgttgttgtgcgaacaaattcgcctgccgcaacccttgccgaaagccgaagccttaacgcgggtgcgtcagcaactgattgcccggcaacagaaacattatcagcgccagtggctgcaacaactgatcaacgcctgagcctgttctccttcttgttgatgcagacgggttaatgcccgttttgcacgaaaaatgcacataaattgcctgcgttgccttataacagcgcagggaaatcctgcctccggccttgtgccacaccgcgctttgcctggtttgtggtaaaaactggcccgctttgcatcctgatgcttaaaacaccccgttcagatcaacctttgggcagataagcccgcgaaaggcctgcaaattgcacggttattccgggtgagtatatgtgtgatttgggttccggcattgcgcaataaaggggagaaagacatgagcatcacggcgttatcagcatcatttcctgaggggaatatcgccagccgcttgtcgctgcaacatccttcactgttttataccgtggttgaacaatcttcggtggcgatttcgctgaccgatccgcaggcgcgcatttgttatgccaatccggcattctgccgccagacgggttttgcacttgagacacttttgggcgagaaccaccgtctgctggagtctgaactcatcctgcgatgggggctgggccgtctctgaagctctcggtgaacattgttgcgaggcaggatgcgagctggttgtgttttgacattaccgataatgtgccgcgtgaacgggtgcgttatgcccgcccggaagcggcgttttcccgtccggggaatggcatggagctgcgccttatccagacgctgatcgcccatcatcgcggttctttagatctctcggtccgccctgatggcggcaccttgctgacgttacgcctgccggtacagcaggttatcaccggaggcttaaaatgacccagttacctaccgcgggcccggttatccggcgctttgatatgtctgcccagtttacggcgctttatcgcatcagcgtggcgctgagtcaggaaagcaacaccgggcgcgcactggcggcgatcctcgaagtgcttcacgatcatgcatttatgcaatacggcatggtgtgtctgtttgataaagaacgcaatgcactctttgtggaatccctgcatggcatcgacggcgaaaggaaaaaagagacccgccatgtccgttaccgcatgggggaaggcgtgatcggcgcggtgatgagccagcgtcaggcgctggtgttaccgcgcatttcagacgatcagcgttttctcgaccgcctgaatatttacgattacagcctgccgttgattggcgtgccgatccccggtgcggataatcagccatcgggcgtgctggtggcacagccgatggcgttgcacgaagaccggctgactgccagtacgcggtttttagaaatggtc

SEQ ID NO: 301 - DNA, 266 bp, Artificial Sequence
  Synthetic polynucleotide
  misc_feature (1)..(266): delta-nifL::null-v2
atgagcatcacggcgttatcagcatcatttcctgaggggaatatcgccagccgcttgtcgctgcaacatccttcactgttttataccgtggttgaacaatcttcggtggcgatttcgctgaccgatccgcaggcgcgcatttgttatgccaatccggcattctgccgccagacgggttttgcacttgagacacttttgggcgagaaccaccgtctgctggttaaagcctgccggtacagcaggttatcaccggaggcttaaaatga

SEQ ID NO: 302 - DNA, 1266 bp, Artificial Sequence
  Synthetic polynucleotide
  misc_feature (1)..(1266): delta-nifL::null-v2 with 500bp flank
tgtttcgtctcgaggccgggcaactgagcggccccgttgaaaccgacctgggctggcatctgttgttgtgcgaacaaattcgcctgccgcaacccttgccgaaagccgaagccttaacgcgggtgcgtcagcaactgattgcccggcaacagaaacattatcagcgccagtggctgcaacaactgatcaacgcctgagcctgttctccttcttgttgatgcagacgggttaatgcccgttttgcacgaaaaatgcacataaattgcctgcgttgccttataacagcgcagggaaatcctgcctccggccttgtgccacaccgcgctttgcctggtttgtggtaaaaactggcccgctttgcatcctgatgcttaaaacaccccgttcagatcaacctttgggcagataagcccgcgaaaggcctgcaaattgcacggttattccgggtgagtatatgtgtgatttgggttccggcattgcgcaataaaggggagaaagacatgagcatcacggcgttatcagcatcatttcctgaggggaatatcgccagccgcttgtcgctgcaacatccttcactgttttataccgtggttgaacaatcttcggtggcgatttcgctgaccgatccgcaggcgcgcatttgttatgccaatccggcattctgccgccagacgggttttgcacttgagacacttttgggcgagaaccaccgtctgctggttaaagcctgccggtacagcaggttatcaccggaggcttaaaatgacccagttacctaccgcgggcccggttatccggcgctttgatatgtctgcccagtttacggcgctttatcgcatcagcgtggcgctgagtcaggaaagcaacaccgggcgcgcactggcggcgatcctcgaagtgcttcacgatcatgcatttatgcaatacggcatggtgtgtctgtttgataaagaacgcaatgcactctttgtggaatccctgcatggcatcgacggcgaaaggaaaaaagagacccgccatgtccgttaccgcatgggggaaggcgtgatcggcgcggtgatgagccagcgtcaggcgctggtgttaccgcgcatttcagacgatcagcgttttctcgaccgcctgaatatttacgattacagcctgccgttgattggcgtgccgatccccggtgcggataatcagccatcgggcgtgctggtggcacagccgatggcgttgcacgaagaccggctgactgccagtacgcggtttttagaaatggtc

SEQ ID NO: 303 - DNA, 943 bp, Artificial Sequence
  Synthetic polynucleotide
  misc_feature (1)..(943): delta-nifL::Prm4
atgagcatcacggcgttatcagcatcatttcctgaggggaatatcgccagccgcttgtcgctgcaacatccttcactgttttataccgtggttgaacaatcttcggtggcgatttcgctgaccgatccgcaggcgcgcatttgttatgccaatccggcattctgccgccagacgggttttgcacttgagacacttttgggcgagaaccaccgtctgctggagtctgaactcatcctgcggcagtcggtgagacgtatttttgaccaaagagtgatctacatcacggaattttgtggttgttgctgcttaaaagggcaaatctacccttagaatcaactgttatatcagggggattcagagagatattaggaatttgcacaagcgcacaatttaaccacatcatgataacgccatgtaaaacaaagataaaaaaacaaaatgcagtgacttacatcgcaagcaaggcattttcttatccaattgctcaaagtttggcctttcatatcgcaacgaaaatgcgtaatatacgcgcccttgcggacatcagtatggtcattcctagttcatgcgcatcggacaccaccagcttacaaattgcctgattgcggccccgatggccggtatcactgaccgaccatttcgtgccttatgtcatgcgatgggggctgggccgtctctgaagctctcggtgaacattgttgcgaggcaggatgcgagctggttgtgttttgacattaccgataatgtgccgcgtgaacgggtgcgttatgcccgcccggaagcggcgttttcccgtccggggaatggcatggagctgcgccttatccagacgctgatcgcccatcatcgcggttctttagatctctcggtccgccctgatggcggcaccttgctgacgttacgcctgccggtacagcaggttatcaccggaggcttaaaatga

SEQ ID NO: 304 - DNA, 1943 bp, Artificial Sequence
  Synthetic polynucleotide
  misc_feature (1)..(1943): delta-nifL::Prm4 with 500bp flank
tgtttcgtctcgaggccgggcaactgagcggccccgttgaaaccgacctgggctggcatctgttgttgtgcgaacaaattcgcctgccgcaacccttgccgaaagccgaagccttaacgcgggtgcgtcagcaactgattgcccggcaacagaaacattatcagcgccagtggctgcaacaactgatcaacgcctgagcctgttctccttcttgttgatgcagacgggttaatgcccgttttgcacgaaaaatgcacataaattgcctgcgttgccttataacagcgcagggaaatcctgcctccggccttgtgccacaccgcgctttgcctggtttgtggtaaaaactggcccgctttgcatcctgatgcttaaaacaccccgttcagatcaacctttgggcagataagcccgcgaaaggcctgcaaattgcacggttattccgggtgagtatatgtgtgatttgggttccggcattgcgcaataaaggggagaaagacatgagcatcacggcgttatcagcatcatttcctgaggggaatatcgccagccgcttgtcgctgcaacatccttcactgttttataccgtggttgaacaatcttcggtggcgatttcgctgaccgatccgcaggcgcgcatttgttatgccaatccggcattctgccgccagacgggttttgcacttgagacacttttgggcgagaaccaccgtctgctggagtctgaactcatcctgcggcagtcggtgagacgtatttttgaccaaagagtgatctacatcacggaattttgtggttgttgctgcttaaaagggcaaatctacccttagaatcaactgttatatcagggggattcagagagatattaggaatttgcacaagcgcacaatttaaccacatcatgataacgccatgtaaaacaaagataaaaaaacaaaatgcagtgacttacatcgcaagcaaggcattttcttatccaattgctcaaagtttggcctttcatatcgcaacgaaaatgcgtaatatacgcgcccttgcggacatcagtatggtcattcctagttcatgcgcatcggacaccaccagcttacaaattgcctgattgcggccccgatggccggtatcactgaccgaccatttcgtgccttatgtcatgcgatgggggctgggccgtctctgaagctctcggtgaacattgttgcgaggcaggatgcgagctggttgtgttttgacattaccgataatgtgccgcgtgaacgggtgcgttatgcccgcccggaagcggcgttttcccgtccggggaatggcatggagctgcgccttatccagacgctgatcgcccatcatcgcggttctttagatctctcggtccgccctgatggcggcaccttgctgacgttacgcctgccggtacagcaggttatcaccggaggcttaaaatgacccagttacctaccgcgggcccggttatccggcgctttgatatgtctgcccagtttacggcgctttatcgcatcagcgtggcgctgagtcaggaaagcaacaccgggcgcgcactggcggcgatcctcgaagtgcttcacgatcatgcatttatgcaatacggcatggtgtgtctgtttgataaagaacgcaatgcactctttgtggaatccctgcatggcatcgacggcgaaaggaaaaaagagacccgccatgtccgttaccgcatgggggaaggcgtgatcggcgcggtgatgagccagcgtcaggcgctggtgttaccgcgcatttcagacgatcagcgttttctcgaccgcctgaatatttacgattacagcctgccgttgattggcgtgccgatccccggtgcggataatcagccatcgggcgtgctggtggcacagccgatggcgttgcacgaagaccggctgactgccagtacgcggtttttagaaatggtc

SEQ ID NO: 305 - DNA, 100 bp, Artificial Sequence
  Synthetic polynucleotide
  misc_feature (1)..(100): 100 bp upstream of junction
tggtgtccgggcgaacgtcgccaggtggcacaaattgtcagaactacgacacgactaaccgaccgcaggagtgtgcgatgaccctgaatatgatgatgga

SEQ ID NO: 306 - DNA, 100 bp, Artificial Sequence
  Synthetic polynucleotide
  misc_feature (1)..(100): 100 bp upstream of junction
cggaaaacgagttcaaacggcgcgtcccaatcgtattaatggcgagattcgcgccacggaagttcgcttaacaggtctggaaggcgagcagcttggtatt

SEQ ID NO: 307 - DNA, 100 bp, Artificial Sequence
  Synthetic polynucleotide
  misc_feature (1)..(100): 100 bp upstream of junction
cgccagagagttgaaatcgaacatttccgtaataccgccattacccaggagccgttctggttgcacagcggaaaacgttaacgaaaggatatttcgcatg

SEQ ID NO: 308 - DNA, 100 bp, Artificial Sequence
  Synthetic polynucleotide
  misc_feature (1)..(100): 100 bp upstream of junction
cgggcgaacgtcgccaggtggcacaaattgtcagaactacgacacgactaaccgaccgcaggagtgtgcgatgaccctgaatatgatgatggatgccagc

SEQ ID NO: 309 - DNA, 100 bp, Artificial Sequence
  Synthetic polynucleotide
  misc_feature (1)..(100): 100 bp upstream of junction
tcaacctaaaaaagtttgtgtaatacttgtaacgctacatggagattaactcaatctagagggtattaataatgaatcgtactaaactggtactgggcgc

SEQ ID NO: 310 - DNA, 100 bp, Artificial Sequence; identical to SEQ ID NO: 308
  Synthetic polynucleotide
  misc_feature (1)..(100): 100 bp upstream of junction

SEQ ID NO: 311 - DNA, 100 bp, Artificial Sequence
  Synthetic polynucleotide
  misc_feature (1)..(100): 100 bp upstream of junction
aattttctgcccaaatggctgggattgttcattttttgtttgccttacaacgagagtgacagtacgcgcgggtagttaactcaacatctgaccggtcgat

SEQ ID NO: 312 - DNA, 100 bp, Artificial Sequence
  Synthetic polynucleotide
  misc_feature (1)..(100): 100 bp upstream of junction
gtaaccaataaaggccaccacgccagaccacacgatagtgatggcaacactttccagctgcaccagcacctgatggcccatggtcacaccttcagcgaaa

SEQ ID NO: 313 - DNA, 100 bp, Artificial Sequence
  Synthetic polynucleotide
  misc_feature (1)..(100): 100 bp upstream of junction
tggtattgtcagtctgaatgaagctcttgaaaaagctgaggaagcgggcgtcgatttagtagaaatcagtccgaatgccgagccgccagtttgtcgaatc

SEQ ID NO: 314 - DNA, 100 bp, Artificial Sequence
  Synthetic polynucleotide
  misc_feature (1)..(100): 100 bp upstream of junction
accgatccgcaggcgcgcatttgttatgccaatccggcattctgccgccagacgggttttgcacttgagacacttttgggcgagaaccaccgtctgctgg

SEQ ID NO: 315 - DNA, 100 bp, Artificial Sequence
  Synthetic polynucleotide
  misc_feature (1)..(100): 100 bp upstream of junction
cgggaaccggtgttataatgccgcgccctcatattgtggggatttcttaatgacctatcctgggtcctaaagttgtagttgacattagcggagcactaac

SEQ ID NO: 316 - DNA, 100 bp, Artificial Sequence; identical to SEQ ID NO: 314
  Synthetic polynucleotide
  misc_feature (1)..(100): 100 bp upstream of junction

SEQ ID NO: 317 - DNA, 100 bp, Artificial Sequence; identical to SEQ ID NO: 309
  Synthetic polynucleotide
  misc_feature (1)..(100): 100 bp upstream of junction

SEQ ID NO: 318 - DNA, 100 bp, Artificial Sequence
  Synthetic polynucleotide
  misc_feature (1)..(100): 100 bp upstream of junction
gggcgacaaacggcctggtggcacaaattgtcagaactacgacacgactaactgaccgcaggagtgtgcgatgaccctgaatatgatgatggatgccggc

SEQ ID NO: 319 - DNA, 100 bp, Artificial Sequence; identical to SEQ ID NO: 318
  Synthetic polynucleotide
  misc_feature (1)..(100): 100 bp upstream of junction

SEQ ID NO: 320 - DNA, 100 bp, Artificial Sequence
  Synthetic polynucleotide
  misc_feature (1)..(100): 100 bp upstream of junction
taagaattatctggatgaatgtgccattaaatgcgcagcataatggtgcgttgtgcgggaaaactgcttttttttgaaagggttggtcagtagcggaaac

SEQ ID NO: 321 - DNA, 100 bp, Artificial Sequence
  Synthetic polynucleotide
  misc_feature (1)..(100): 100 bp upstream of junction
cgccagagagtcgaaatcgaacatttccgtaataccgcgattacccaggagccgttctggttgcacagcggaaaacgttaacgaaaggatatttcgcatg

SEQ ID NO: 322 - DNA, 100 bp, Artificial Sequence; identical to SEQ ID NO: 321
  Synthetic polynucleotide
  misc_feature (1)..(100): 100 bp upstream of junction

SEQ ID NO: 323 - DNA, 100 bp, Artificial Sequence
  Synthetic polynucleotide
  misc_feature (1)..(100): 100 bp upstream of junction
gatgatggatgctttctggttaaacgggcaacctcgttaactgactgactagcctgggcaaactgcccgggcttttttttgcaaggaatctgatttcatg

SEQ ID NO: 324 - DNA, 100 bp, Artificial Sequence; identical to SEQ ID NO: 314
  Synthetic polynucleotide
  misc_feature (1)..(100): 100 bp upstream of junction

SEQ ID NO: 325 - DNA, 100 bp, Artificial Sequence
  Synthetic polynucleotide
  misc_feature (1)..(100): 100 bp upstream of junction
catcggacaccaccagcttacaaattgcctgattgcggccccgatggccggtatcactgaccgaccatttcgtgccttatgtcatgcgatgggggctggg

SEQ ID NO: 326 - DNA, 100 bp, Artificial Sequence
  Synthetic polynucleotide
  misc_feature (1)..(100): 100 bp upstream of junction
tcttcaacaactggaggaataaggtattaaaggcggaaaacgagttcaaacggcacgtccgaatcgtatcaatggcgagattcgcgccctggaagttcgc

SEQ ID NO: 327 - DNA, 100 bp, Artificial Sequence
  Synthetic polynucleotide
  misc_feature (1)..(100): 100 bp upstream of junction
tccgggttcggcttaccccgccgcgttttgcgcacggtgtcggacaatttgtcataactgcgacacaggagtttgcgatgaccctgaatatgatgctcga

SEQ ID NO: 328 - DNA, 100 bp, Artificial Sequence
  Synthetic polynucleotide
  misc_feature (1)..(100): 100 bp upstream of junction
atcgcagcgtctttgaatatttccgtcgccaggcgctggctgccgagccgttctggctgcatagtggaaaacgataatttcaggccagggagcccttatg

SEQ ID NO: 329 - DNA, 100 bp, Artificial Sequence; identical to SEQ ID NO: 327
  Synthetic polynucleotide
  misc_feature (1)..(100): 100 bp upstream of junction

SEQ ID NO: 330 - DNA, 100 bp, Artificial Sequence
  Synthetic polynucleotide
  misc_feature (1)..(100): 100 bp upstream of junction
tcactttttagcaaagttgcactggacaaaaggtaccacaattggtgtactgatactcgacacagcattagtgtcgatttttcatataaaggtaattttg

SEQ ID NO: 331 - DNA, 100 bp, Artificial Sequence; identical to SEQ ID NO: 327
  Synthetic polynucleotide
  misc_feature (1)..(100): 100 bp upstream of junction

SEQ ID NO: 332 - DNA, 100 bp, Artificial Sequence
  Synthetic polynucleotide
  misc_feature (1)..(100): 100 bp upstream of junction
gttctcctttgcaatagcagggaagaggcgccagaaccgccagcgttgaagcagtttgaacgcgttcagtgtataatccgaaacttaatttcggtttgga

SEQ ID NO: 333 - DNA, 100 bp, Artificial Sequence; identical to SEQ ID NO: 327
  Synthetic polynucleotide
  misc_feature (1)..(100): 100 bp upstream of junction

SEQ ID NO: 334 - DNA, 100 bp, Artificial Sequence
  Synthetic polynucleotide
  misc_feature (1)..(100): 100 bp upstream of junction
gatatgcctgaagtattcaattacttaggcatttacttaacgcaggcaggcaattttgatgctgcctatgaagcgtttgattctgtacttgagcttgatc

SEQ ID NO: 335 - DNA, 100 bp, Artificial Sequence; identical to SEQ ID NO: 313
  Synthetic polynucleotide
  misc_feature (1)..(100): 100 bp upstream of junction

SEQ ID NO: 336 - DNA, 100 bp, Artificial Sequence
  Synthetic polynucleotide
  misc_feature (1)..(100): 100 bp upstream of junction
tgcaaattgcacggttattccgggtgagtatatgtgtgatttgggttccggcattgcgcaataaaggggagaaagacatgagcatcacggcgttatcagc

SEQ ID NO: 337 - DNA, 100 bp, Artificial Sequence
  Synthetic polynucleotide
  misc_feature (1)..(100): 100 bp upstream of junction
tcagggctgcggatgtcgggcgtttcacaacacaaaatgttgtaaatgcgacacagccgggcctgaaaccaggagcgtgtgatgacctttaatatgatgc

SEQ ID NO: 338 - DNA, 100 bp, Artificial Sequence
  Synthetic polynucleotide
  misc_feature (1)..(100): 100 bp upstream of junction
cggaaaacgagttcaaacggcacgtccgaatcgtatcaatggcgagattcgcgcccaggaagttcgcttaactggtctggaaggtgagcagctgggtatt

SEQ ID NO: 339 - DNA, 100 bp, Artificial Sequence
  Synthetic polynucleotide
  misc_feature (1)..(100): 100 bp downstream of junction
ttcttggttctctggagcgctttatcggcatcctgactgaagaatttgcaggcttcttcccaacctggcttgcacccgtgcaggtagttgtgatgaacat

SEQ ID NO: 340 - DNA, 100 bp, Artificial Sequence
  Synthetic polynucleotide
  misc_feature (1)..(100): 100 bp downstream of junction
gcgatagaactcacttcacgccccgaagggggaagctgcctgaccctacgattcccgctatttcattcactgaccggaggttcaaaatgacccagcgaac

SEQ ID NO: 341 - DNA, 100 bp, Artificial Sequence
  Synthetic polynucleotide
  misc_feature (1)..(100): 100 bp downstream of junction
tccctgtgcgccgcgtcgccgatggtggccagccaactggcgcgctacccgatcctgctcgatgaactgctcgacccgaacacgctctatcaaccgacgg

SEQ ID NO: 342 - DNA, 100 bp, Artificial Sequence
  Synthetic polynucleotide
  misc_feature (1)..(100): 100 bp downstream of junction
cgttctgtaataataaccggacaattcggactgattaaaaaagcgccctcgcggcgctttttttatattctcgactccatttaaaataaaaaatccaatc

SEQ ID NO: 343 - DNA, 100 bp, Artificial Sequence
  Synthetic polynucleotide
  misc_feature (1)..(100): 100 bp downstream of junction
aactcacttcacgccccgaagggggaagctgcctgaccctacgattcccgctatttcattcactgaccggaggttcaaaatgacccagcgaaccgagtcg

SEQ ID NO: 344 - DNA, 100 bp, Artificial Sequence
  Synthetic polynucleotide
  misc_feature (1)..(100): 100 bp downstream of junction
cgcgtcaggttgaacgtaaaaaagtcggtctgcgcaaagcacgtcgtcgtccgcagttctccaaacgttaattggtttctgcttcggcagaacgattggc

SEQ ID NO: 345 - DNA, 100 bp, Artificial Sequence; identical to SEQ ID NO: 343
  Synthetic polynucleotide
  misc_feature (1)..(100): 100 bp downstream of junction

SEQ ID NO: 346 - DNA, 100 bp, Artificial Sequence
  Synthetic polynucleotide
  misc_feature (1)..(100): 100 bp downstream of junction
ccgatccccatcactgtgtgtcttgtattacagtgccgcttcgtcggcttcgccggtacgaatacgaatgacgcgttgcagctcagcaacgaaaattttg

SEQ ID NO: 347 - DNA, 100 bp, Artificial Sequence
  Synthetic polynucleotide
  misc_feature (1)..(100): 100 bp downstream of junction
ccgtctctgaagctctcggtgaacattgttgcgaggcaggatgcgagctggttgtgttttgacattaccgataatgtgccgcgtgaacgggtgcgttatg

SEQ ID NO: 348 - DNA, 100 bp, Artificial Sequence
  Synthetic polynucleotide
  misc_feature (1)..(100): 100 bp downstream of junction
tgaacatcactgatgcacaagctacctatgtcgaagaattaactaaaaaactgcaagatgcaggcattcgcgttaaagccgacttgagaaatgagaagat

SEQ ID NO: 349 - DNA, 100 bp, Artificial Sequence; identical to SEQ ID NO: 347
  Synthetic polynucleotide
  misc_feature (1)..(100): 100 bp downstream of junction

SEQ ID NO: 350 - DNA, 100 bp, Artificial Sequence
  Synthetic polynucleotide
  misc_feature (1)..(100): 100 bp downstream of junction
tacagtagcgcctctcaaaaatagataaacggctcatgtacgtgggccgtttattttttctacccataatcgggaaccggtgttataatgccgcgccctc

SEQ ID NO: 351 - DNA, 100 bp, Artificial Sequence
  Synthetic polynucleotide
  misc_feature (1)..(100): 100 bp downstream of junction
aactcacttcacaccccgaagggggaagttgcctgaccctacgattcccgctatttcattcactgaccggaggttcaaaatgacccagcgaaccgagtcg

SEQ ID NO: 352 - DNA, 100 bp, Artificial Sequence
  Synthetic polynucleotide
  misc_feature (1)..(100): 100 bp downstream of junction
cgtcctgtaataataaccggacaattcggactgattaaaaaagcgcccttgtggcgctttttttatattcccgcctccatttaaaataaaaaatccaatc

SEQ ID NO: 353 - DNA, 100 bp, Artificial Sequence
  Synthetic polynucleotide
  misc_feature (1)..(100): 100 bp downstream of junction
ggacatcatcgcgacaaacaatattaataccggcaaccacaccggcaatttacgagactgcgcaggcatcctttctcccgtcaatttctgtcaaataaag

SEQ ID NO: 354 - DNA, 100 bp, Artificial Sequence; identical to SEQ ID NO: 351
  Synthetic polynucleotide
  misc_feature (1)..(100): 100 bp downstream of junction

SEQ ID NO: 355 - DNA, 100 bp, Artificial Sequence
  Synthetic polynucleotide
  misc_feature (1)..(100): 100 bp downstream of junction
tttaacgatctgattggcgatgatgaaacggattcgccggaagatgcgctttctgagagctggcgcgaattgtggcaggatgcgttgcaggaggaggatt

SEQ ID NO: 356 - DNA, 100 bp, Artificial Sequence
  Synthetic polynucleotide
  misc_feature (1)..(100): 100 bp downstream of junction
gcactgaaacacctcatttccctgtgtgccgcgtcgccgatggttgccagtcagctggcgcgctacccgatcctgcttgatgaattgctcgacccgaata

SEQ ID NO: 357 - DNA, 100 bp, Artificial Sequence
  Synthetic polynucleotide
  misc_feature (1)..(100): 100 bp downstream of junction
gcgctcaaacagttaatccgtctgtgtgccgcctcgccgatggtcgcgacacaacttgcacgtcatcctttattgctcgatgaactgctcgacccgcgca

SEQ ID NO: 358 - DNA, 100 bp, Artificial Sequence
  Synthetic polynucleotide
  misc_feature (1)..(100): 100 bp downstream of junction
agtctgaactcatcctgcggcagtcggtgagacgtatttttgaccaaagagtgatctacatcacggaattttgtggttgttgctgcttaaaagggcaaat

SEQ ID NO: 359 - DNA, 100 bp, Artificial Sequence; identical to SEQ ID NO: 347
  Synthetic polynucleotide
  misc_feature (1)..(100): 100 bp downstream of junction

SEQ ID NO: 360 - DNA, 100 bp, Artificial Sequence
  Synthetic polynucleotide
  misc_feature (1)..(100): 100 bp downstream of junction
gccattgagctggcttcccgaccgcagggcggcacctgcctgaccctgcgtttcccgctgtttaacaccctgaccggaggtgaagcatgatccctgaatc

SEQ ID NO: 361 - DNA, 100 bp, Artificial Sequence
  Synthetic polynucleotide
  misc_feature (1)..(100): 100 bp downstream of junction
agcgtcaggtaccggtcatgattcaccgtgcgattctcggttccctggagcgcttcattggcatcctgaccgaagagttcgctggcttcttcccaacctg

SEQ ID NO: 362 - DNA, 100 bp, Artificial Sequence
  Synthetic polynucleotide
  misc_feature (1)..(100): 100 bp downstream of junction
gcgctgaagcacctgatcacgctctgcgcggcgtcgccgatggtcgccagccagctggcgcgccacccgctgctgctggatgagctgctggatcccaaca

SEQ ID NO: 363 - DNA, 100 bp, Artificial Sequence
  Synthetic polynucleotide
  misc_feature (1)..(100): 100 bp downstream of junction
gcccgctgaccgaccagaacttccaccttggactcggctatacccttggcgtgacggcgcgcgataactgggactacatccccattccggtgatcttacc

SEQ ID NO: 364 - DNA, 100 bp, Artificial Sequence; identical to SEQ ID NO: 360
  Synthetic polynucleotide
  misc_feature (1)..(100): 100 bp downstream of junction

SEQ ID NO: 365 - DNA, 100 bp, Artificial Sequence
  Synthetic polynucleotide
  misc_feature (1)..(100): 100 bp downstream of junction
gctaaagttctcggctaatcgctgataacatttgacgcaatgcgcaataaaagggcatcatttgatgccctttttgcacgctttcataccagaacctggc

SEQ ID NO: 366 - DNA, 100 bp, Artificial Sequence; identical to SEQ ID NO: 360
  Synthetic polynucleotide
  misc_feature (1)..(100): 100 bp downstream of junction

SEQ ID NO: 367 - DNA, 100 bp, Artificial Sequence
  Synthetic polynucleotide
  misc_feature (1)..(100): 100 bp downstream of junction
cgccgtcctcgcagtaccattgcaaccgactttacagcaagaagtgattctggcacgcatggaacaaattcttgccagtcgggctttatccgatgacgaa

SEQ ID NO: 368 - DNA, 100 bp, Artificial Sequence; identical to SEQ ID NO: 360
  Synthetic polynucleotide
  misc_feature (1)..(100): 100 bp downstream of junction

SEQ ID NO: 369 - DNA, 100 bp, Artificial Sequence
  Synthetic polynucleotide
  misc_feature (1)..(100): 100 bp downstream of junction
tctttagatctctcggtccgccctgatggcggcaccttgctgacgttacgcctgccggtacagcaggttatcaccggaggcttaaaatgacccagttacc

SEQ ID NO: 370 - DNA, 100 bp, Artificial Sequence
  Synthetic polynucleotide
  misc_feature (1)..(100): 100 bp downstream of junction
tgaatatcactgactcacaagctacctatgtcgaagaattaactaaaaaactgcaagatgcaggcattcgcgttaaagccgacttgagaaatgagaagat

SEQ ID NO: 371 - DNA, 100 bp, Artificial Sequence
  Synthetic polynucleotide
  misc_feature (1)..(100): 100 bp downstream of junction
ctggggtcactggagcgctttatcggcatcctgaccgaagaatttgccggtttcttcccgacctggctggcccctgttcaggttgtggtgatgaatatca

SEQ ID NO: 372 - DNA, 100 bp, Artificial Sequence
  Synthetic polynucleotide
  misc_feature (1)..(100): 100 bp downstream of junction
gcaatagaactaactacccgccctgaaggcggtacctgcctgaccctgcgattcccgttatttcattcactgaccggaggcccacgatgacccagcgacc

SEQ ID NO: 373 - DNA, 200 bp, Artificial Sequence
  Synthetic polynucleotide
  misc_feature (1)..(200): disrupted nifL gene / PinfC
tggtgtccgggcgaacgtcgccaggtggcacaaattgtcagaactacgacacgactaaccgaccgcaggagtgtgcgatgaccctgaatatgatgatggattcttggttctctggagcgctttatcggcatcctgactgaagaatttgcaggcttcttcccaacctggcttgcacccgtgcaggtagttgtgatgaacat

SEQ ID NO: 374 - DNA, 200 bp, Artificial Sequence
  Synthetic polynucleotide
  misc_feature (1)..(200): PinfC / disrupted nifL gene
cggaaaacgagttcaaacggcgcgtcccaatcgtattaatggcgagattcgcgccacggaagttcgcttaacaggtctggaaggcgagcagcttggtattgcgatagaactcacttcacgccccgaagggggaagctgcctgaccctacgattcccgctatttcattcactgaccggaggttcaaaatgacccagcgaac

SEQ ID NO: 375 - DNA, 200 bp, Artificial Sequence
  Synthetic polynucleotide
  misc_feature (1)..(200): 5' UTR and ATG / truncated glnE gene
cgccagagagttgaaatcgaacatttccgtaataccgccattacccaggagccgttctggttgcacagcggaaaacgttaacgaaaggatatttcgcatgtccctgtgcgccgcgtcgccgatggtggccagccaactggcgcgctacccgatcctgctcgatgaactgctcgacccgaacacgctctatcaaccgacgg

SEQ ID NO: 376 - DNA, 200 bp, Artificial Sequence
  Synthetic polynucleotide
  misc_feature (1)..(200): disrupted nifL gene / Prm1
cgggcgaacgtcgccaggtggcacaaattgtcagaactacgacacgactaaccgaccgcaggagtgtgcgatgaccctgaatatgatgatggatgccagccgttctgtaataataaccggacaattcggactgattaaaaaagcgccctcgcggcgctttttttatattctcgactccatttaaaataaaaaatccaatc

SEQ ID NO: 377 - DNA, 200 bp, Artificial Sequence
  Synthetic polynucleotide
  misc_feature (1)..(200): Prm1 / disrupted nifL gene
tcaacctaaaaaagtttgtgtaatacttgtaacgctacatggagattaactcaatctagagggtattaataatgaatcgtactaaactggtactgggcgcaactcacttcacgccccgaagggggaagctgcctgaccctacgattcccgctatttcattcactgaccggaggttcaaaatgacccagcgaaccgagtcg

SEQ ID NO: 378 - DNA, 200 bp, Artificial Sequence
  Synthetic polynucleotide
  misc_feature (1)..(200): disrupted nifL gene / Prm7
cgggcgaacgtcgccaggtggcacaaattgtcagaactacgacacgactaaccgaccgcaggagtgtgcgatgaccctgaatatgatgatggatgccagccgcgtcaggttgaacgtaaaaaagtcggtctgcgcaaagcacgtcgtcgtccgcagttctccaaacgttaattggtttctgcttcggcagaacgattggc

SEQ ID NO: 379 - DNA, 200 bp, Artificial Sequence
  Synthetic polynucleotide
  misc_feature (1)..(200): Prm4 / disrupted nifL gene
aattttctgcccaaatggctgggattgttcattttttgtttgccttacaacgagagtgacagtacgcgcgggtagttaactcaacatctgaccggtcgataactcacttcacgccccgaagggggaagctgcctgaccctacgattcccgctatttcattcactgaccggaggttcaaaatgacccagcgaaccgagtcg

SEQ ID NO: 380 - DNA, 200 bp, Artificial Sequence
  Synthetic polynucleotide
  misc_feature (1)..(200): 5' UTR up to ATG-4bp of amtB gene / disrupted amtB gene
gtaaccaataaaggccaccacgccagaccacacgatagtgatggcaacactttccagctgcaccagcacctgatggcccatggtcacaccttcagcgaaaccgatccccatcactgtgtgtcttgtattacagtgccgcttcgtcggcttcgccggtacgaatacgaatgacgcgttgcagctcagcaacgaaaattttg

SEQ ID NO: 381 - DNA, 200 bp, Artificial Sequence
  Synthetic polynucleotide
  misc_feature (1)..(200): Prm1.2 / disrupted nifL gene
tggtattgtcagtctgaatgaagctcttgaaaaagctgaggaagcgggcgtcgatttagtagaaatcagtccgaatgccgagccgccagtttgtcgaatcccgtctctgaagctctcggtgaacattgttgcgaggcaggatgcgagctggttgtgttttgacattaccgataatgtgccgcgtgaacgggtgcgttatg

SEQ ID NO: 382 - DNA, 200 bp, Artificial Sequence
  Synthetic polynucleotide
  misc_feature (1)..(200): disrupted nifL gene / Prm1.2
accgatccgcaggcgcgcatttgttatgccaatccggcattctgccgccagacgggttttgcacttgagacacttttgggcgagaaccaccgtctgctggtgaacatcactgatgcacaagctacctatgtcgaagaattaactaaaaaactgcaagatgcaggcattcgcgttaaagccgacttgagaaatgagaagat

SEQ ID NO: 383 - DNA, 200 bp, Artificial Sequence
  Synthetic polynucleotide
  misc_feature (1)..(200): Prm3.1 / disrupted nifL gene
cgggaaccggtgttataatgccgcgccctcatattgtggggatttcttaatgacctatcctgggtcctaaagttgtagttgacattagcggagcactaacccgtctctgaagctctcggtgaacattgttgcgaggcaggatgcgagctggttgtgttttgacattaccgataatgtgccgcgtgaacgggtgcgttatg

SEQ ID NO: 384 - DNA, 200 bp, Artificial Sequence
  Synthetic polynucleotide
  misc_feature (1)..(200): disrupted nifL gene / Prm3.1
accgatccgcaggcgcgcatttgttatgccaatccggcattctgccgccagacgggttttgcacttgagacacttttgggcgagaaccaccgtctgctggtacagtagcgcctctcaaaaatagataaacggctcatgtacgtgggccgtttattttttctacccataatcgggaaccggtgttataatgccgcgccctc

SEQ ID NO: 385 - DNA, 200 bp, Artificial Sequence
  Synthetic polynucleotide
  misc_feature (1)..(200): Prm1 / disrupted nifL gene
tcaacctaaaaaagtttgtgtaatacttgtaacgctacatggagattaactcaatctagagggtattaataatgaatcgtactaaactggtactgggcgcaactcacttcacaccccgaagggggaagttgcctgaccctacgattcccgctatttcattcactgaccggaggttcaaaatgacccagcgaaccgagtcg

SEQ ID NO: 386 - DNA, 200 bp, Artificial Sequence
  Synthetic polynucleotide
  misc_feature (1)..(200): disrupted nifL gene / Prm1
gggcgacaaacggcctggtggcacaaattgtcagaactacgacacgactaactgaccgcaggagtgtgcgatgaccctgaatatgatgatggatgccggccgtcctgtaataataaccggacaattcggactgattaaaaaagcgcccttgtggcgctttttttatattcccgcctccatttaaaataaaaaatccaatc

SEQ ID NO: 387 - DNA, 200 bp, Artificial Sequence
  Synthetic polynucleotide
  misc_feature (1)..(200): disrupted nifL gene / Prm5
gggcgacaaacggcctggtggcacaaattgtcagaactacgacacgactaactgaccgcaggagtgtgcgatgaccctgaatatgatgatggatgccggcggacatcatcgcgacaaacaatattaataccggcaaccacaccggcaatttacgagactgcgcaggcatcctttctcccgtcaatttctgtcaaataaag

SEQ ID NO: 388 - DNA, 200 bp, Artificial Sequence
  Synthetic polynucleotide
  misc_feature (1)..(200): Prm5 / disrupted nifL gene
taagaattatctggatgaatgtgccattaaatgcgcagcataatggtgcgttgtgcgggaaaactgcttttttttgaaagggttggtcagtagcggaaacaactcacttcacaccccgaagggggaagttgcctgaccctacgattcccgctatttcattcactgaccggaggttcaaaatgacccagcgaaccgagtcg

SEQ ID NO: 389 - DNA, 200 bp, Artificial Sequence
  Synthetic polynucleotide
  misc_feature (1)..(200): 5' UTR and ATG / truncated glnE gene
cgccagagagtcgaaatcgaacatttccgtaataccgcgattacccaggagccgttctggttgcacagcggaaaacgttaacgaaaggatatttcgcatgtttaacgatctgattggcgatgatgaaacggattcgccggaagatgcgctttctgagagctggcgcgaattgtggcaggatgcgttgcaggaggaggatt

SEQ ID NO: 390 - DNA, 200 bp, Artificial Sequence
  Synthetic polynucleotide
  misc_feature (1)..(200): 5' UTR and ATG / truncated glnE gene
cgccagagagtcgaaatcgaacatttccgtaataccgcgattacccaggagccgttctggttgcacagcggaaaacgttaacgaaaggatatttcgcatggcactgaaacacctcatttccctgtgtgccgcgtcgccgatggttgccagtcagctggcgcgctacccgatcctgcttgatgaattgctcgacccgaata

SEQ ID NO: 391 - DNA, 200 bp, Artificial Sequence
  Synthetic polynucleotide
  misc_feature (1)..(200): 5' UTR and ATG / truncated glnE gene
gatgatggatgctttctggttaaacgggcaacctcgttaactgactgactagcctgggcaaactgcccgggcttttttttgcaaggaatctgatttcatggcgctcaaacagttaatccgtctgtgtgccgcctcgccgatggtcgcgacacaacttgcacgtcatcctttattgctcgatgaactgctcgacccgcgca

SEQ ID NO: 392 - DNA, 200 bp, Artificial Sequence
  Synthetic polynucleotide
  misc_feature (1)..(200): disrupted nifL gene / Prm4
accgatccgcaggcgcgcatttgttatgccaatccggcattctgccgccagacgggttttgcacttgagacacttttgggcgagaaccaccgtctgctggagtctgaactcatcctgcggcagtcggtgagacgtatttttgaccaaagagtgatctacatcacggaattttgtggttgttgctgcttaaaagggcaaat

SEQ ID NO: 393 - DNA, 200 bp, Artificial Sequence
  Synthetic polynucleotide
  misc_feature (1)..(200): Prm4 / disrupted nifL gene
catcggacaccaccagcttacaaattgcctgattgcggccccgatggccggtatcactgaccgaccatttcgtgccttatgtcatgcgatgggggctgggccgtctctgaagctctcggtgaacattgttgcgaggcaggatgcgagctggttgtgttttgacattaccgataatgtgccgcgtgaacgggtgcgttatg

SEQ ID NO: 394 - DNA, 200 bp, Artificial Sequence
  Synthetic polynucleotide
  misc_feature (1)..(200): PinfC / disrupted nifL gene
tcttcaacaactggaggaataaggtattaaaggcggaaaacgagttcaaacggcacgtccgaatcgtatcaatggcgagattcgcgccctggaagttcgcgccattgagctggcttcccgaccgcagggcggcacctgcctgaccctgcgtttcccgctgtttaacaccctgaccggaggtgaagcatgatccctgaatc

SEQ ID NO: 395 - DNA, 200 bp, Artificial Sequence
  Synthetic polynucleotide
  misc_feature (1)..(200): disrupted nifL gene / PinfC
tccgggttcggcttaccccgccgcgttttgcgcacggtgtcggacaatttgtcataactgcgacacaggagtttgcgatgaccctgaatatgatgctcgaagcgtcaggtaccggtcatgattcaccgtgcgattctcggttccctggagcgcttcattggcatcctgaccgaagagttcgctggcttcttcccaacctg

SEQ ID NO: 396 - DNA, 200 bp, Artificial Sequence
  Synthetic polynucleotide
  misc_feature (1)..(200): 5' UTR and ATG / truncated glnE gene
atcgcagcgtctttgaatatttccgtcgccaggcgctggctgccgagccgttctggctgcatagtggaaaacgataatttcaggccagggagcccttatggcgctgaagcacctgatcacgctctgcgcggcgtcgccgatggtcgccagccagctggcgcgccacccgctgctgctggatgagctgctggatcccaaca

SEQ ID NO: 397 - DNA, 200 bp, Artificial Sequence
  Synthetic polynucleotide
  misc_feature (1)..(200): disrupted nifL gene / Prm1.2
tccgggttcggcttaccccgccgcgttttgcgcacggtgtcggacaatttgtcataactgcgacacaggagtttgcgatgaccctgaatatgatgctcgagcccgctgaccgaccagaacttccaccttggactcggctatacccttggcgtgacggcgcgcgataactgggactacatccccattccggtgatcttacc

SEQ ID NO: 398 - DNA, 200 bp, Artificial Sequence
  Synthetic polynucleotide
  misc_feature (1)..(200): Prm1.2 / disrupted nifL gene
tcactttttagcaaagttgcactggacaaaaggtaccacaattggtgtactgatactcgacacagcattagtgtcgatttttcatataaaggtaattttggccattgagctggcttcccgaccgcagggcggcacctgcctgaccctgcgtttcccgctgtttaacaccctgaccggaggtgaagcatgatccctgaatc

SEQ ID NO: 399 - DNA, 200 bp, Artificial Sequence
  Synthetic polynucleotide
  misc_feature (1)..(200): disrupted nifL gene / Prm6.2
tccgggttcggcttaccccgccgcgttttgcgcacggtgtcggacaatttgtcataactgcgacacaggagtttgcgatgaccctgaatatgatgctcgagctaaagttctcggctaatcgctgataacatttgacgcaatgcgcaataaaagggcatcatttgatgccctttttgcacgctttcataccagaacctggc

SEQ ID NO: 400 - DNA, 200 bp, Artificial Sequence
  Synthetic polynucleotide
  misc_feature (1)..(200): Prm6.2 / disrupted nifL gene
gttctcctttgcaatagcagggaagaggcgccagaaccgccagcgttgaagcagtttgaacgcgttcagtgtataatccgaaacttaatttcggtttggagccattgagctggcttcccgaccgcagggcggcacctgcctgaccctgcgtttcccgctgtttaacaccctgaccggaggtgaagcatgatccctgaatc

SEQ ID NO: 401 - DNA, 200 bp, Artificial Sequence
  Synthetic polynucleotide
  misc_feature (1)..(200): disrupted nifL gene / Prm8.2
tccgggttcggcttaccccgccgcgttttgcgcacggtgtcggacaatttgtcataactgcgacacaggagtttgcgatgaccctgaatatgatgctcgacgccgtcctcgcagtaccattgcaaccgactttacagcaagaagtgattctggcacgcatggaacaaattcttgccagtcgggctttatccgatgacgaa

SEQ ID NO: 402 - DNA, 200 bp, Artificial Sequence
  Synthetic polynucleotide
  misc_feature (1)..(200): Prm8.2 / disrupted nifL gene
gatatgcctgaagtattcaattacttaggcatttacttaacgcaggcaggcaattttgatgctgcctatgaagcgtttgattctgtacttgagcttgatcgccattgagctggcttcccgaccgcagggcggcacctgcctgaccctgcgtttcccgctgtttaacaccctgaccggaggtgaagcatgatccctgaatc

SEQ ID NO: 403 - DNA, 200 bp, Artificial Sequence
  Synthetic polynucleotide
  misc_feature (1)..(200): PinfC / disrupted nifL gene
tggtattgtcagtctgaatgaagctcttgaaaaagctgaggaagcgggcgtcgatttagtagaaatcagtccgaatgccgagccgccagtttgtcgaatctctttagatctctcggtccgccctgatggcggcaccttgctgacgttacgcctgccggtacagcaggttatcaccggaggcttaaaatgacccagttacc

SEQ ID NO: 404 - DNA, 200 bp, Artificial Sequence
  Synthetic polynucleotide
  misc_feature (1)..(200): disrupted nifL gene / PinfC
tgcaaattgcacggttattccgggtgagtatatgtgtgatttgggttccggcattgcgcaataaaggggagaaagacatgagcatcacggcgttatcagctgaatatcactgactcacaagctacctatgtcgaagaattaactaaaaaactgcaagatgcaggcattcgcgttaaagccgacttgagaaatgagaagat

SEQ ID NO: 405 - DNA, 200 bp, Artificial Sequence
  Synthetic polynucleotide
  misc_feature (1)..(200): disrupted nifL gene / PinfC
tcagggctgcggatgtcgggcgtttcacaacacaaaatgttgtaaatgcgacacagccgggcctgaaaccaggagcgtgtgatgacctttaatatgatgcctggggtcactggagcgctttatcggcatcctgaccgaagaatttgccggtttcttcccgacctggctggcccctgttcaggttgtggtgatgaatatca

SEQ ID NO: 406 - DNA, 200 bp, Artificial Sequence
  Synthetic polynucleotide
  misc_feature (1)..(200): PinfC / disrupted nifL gene
cggaaaacgagttcaaacggcacgtccgaatcgtatcaatggcgagattcgcgcccaggaagttcgcttaactggtctggaaggtgagcagctgggtattgcaatagaactaactacccgccctgaaggcggtacctgcctgaccctgcgattcccgttatttcattcactgaccggaggcccacgatgacccagcgacc

SEQ ID NO: 407 - DNA, 20 bp, Artificial Sequence
  Synthetic primer
caagaagttcgcctcacagg

SEQ ID NO: 408 - DNA, 20 bp, Artificial Sequence
  Synthetic primer
tgcctcgcaacaatgttcac

SEQ ID NO: 409 - DNA, 20 bp, Artificial Sequence
  Synthetic primer
cgccctcatattgtggggat

SEQ ID NO: 410 - DNA, 19 bp, Artificial Sequence
  Synthetic primer
ggcataacgcacccgttca

SEQ ID NO: 411 - DNA, 15 bp, Artificial Sequence
  Synthetic probe
tctgaagctctcggt

SEQ ID NO: 412 - DNA, 22 bp, Artificial Sequence
  Synthetic primer
taaactggtactgggcgcaact

SEQ ID NO: 413 - DNA, 23 bp, Artificial Sequence
  Synthetic primer
caaatcgaagcgccagacggtat

SEQ ID NO: 414 - DNA, 15 bp, Artificial Sequence
  Synthetic probe
gaccctacgattccc

SEQ ID NO: 415 - DNA, 20 bp, Artificial Sequence
  Synthetic primer
ggtgcactctttgcatggtt

SEQ ID NO: 416 - DNA, 20 bp, Artificial Sequence
  Synthetic primer
gcgcagtctcgtaaattgcc

SEQ ID NO: 417 - DNA, 15 bp, Artificial Sequence
  Synthetic probe
gcgatgaccctgaat

SEQ ID NO: 418 - DNA, 19 bp, Artificial Sequence
  Synthetic primer
ctcggcagcatggacgtaa

SEQ ID NO: 419 - DNA, 21 bp, Artificial Sequence
  Synthetic primer
agggtgttaaacagcgggaaa

SEQ ID NO: 420 - DNA, 15 bp, Artificial Sequence
  Synthetic probe
tccgaatcgtatcaa

SEQ ID NO: 421 - DNA, 20 bp, Artificial Sequence
  Synthetic primer
gagccgttctggctgcatag

SEQ ID NO: 422 - DNA, 18 bp, Artificial Sequence
  Synthetic primer
gccgtcggctgatagagg

SEQ ID NO: 423 - DNA, 15 bp, Artificial Sequence
  Synthetic probe
tgaagcacctgatca

SEQ ID NO: 424 - DNA, 20 bp, Artificial Sequence
  Synthetic primer
ggaaaacgagttcaaccggc

SEQ ID NO: 425 - DNA, 20 bp, Artificial Sequence
  Synthetic primer
gggcggaccgagagatctaa

SEQ ID NO: 426 - DNA, 100 bp, Artificial Sequence
  Synthetic polynucleotide
  misc_feature (1)..(100): 100 bp upstream of junction
cttcggcggcgtgaagaagagtggttttggtcgcgagctgtcacattttggtctgcacgagttctgtaatgcgcagaccgtctggaaagaccgtcgctaa

SEQ ID NO: 427 - DNA, 100 bp, Artificial Sequence; identical to SEQ ID NO: 330
  Synthetic polynucleotide
  misc_feature (1)..(100): 100 bp upstream of junction

SEQ ID NO: 428 - DNA, 100 bp, Artificial Sequence; identical to SEQ ID NO: 363
  Synthetic polynucleotide
  misc_feature (1)..(100): 100 bp downstream of junction

SEQ ID NO: 429 - DNA, 100 bp, Artificial Sequence
  Synthetic polynucleotide
  misc_feature (1)..(100): 100 bp downstream of junction
atggcggcggtgatcaataacgcaatgctggaagccattctggcagaaatcaggccgctgattggccgcggtaaagtggcggattacattccggcgctgg

SEQ ID NO: 430 - DNA, 200 bp, Artificial Sequence
  3' end of Succinate semialdehyde dehydrogenase/Prm1.2
cttcggcggcgtgaagaagagtggttttggtcgcgagctgtcacattttggtctgcacgagttctgtaatgcgcagaccgtctggaaagaccgtcgctaagcccgctgaccgaccagaacttccaccttggactcggctatacccttggcgtgacggcgcgcgataactgggactacatccccattccggtgatcttacc

SEQ ID NO: 431 - DNA, 200 bp, Artificial Sequence
  Prm1.2/glsA2
tcactttttagcaaagttgcactggacaaaaggtaccacaattggtgtactgatactcgacacagcattagtgtcgatttttcatataaaggtaattttgatggcggcggtgatcaataacgcaatgctggaagccattctggcagaaatcaggccgctgattggccgcggtaaagtggcggattacattccggcgctgg

SEQ ID NO: 432 - DNA, 1327 bp, Artificial Sequence
  glsA2::Prm1.2 ATG-start
gcccgctgaccgaccagaacttccaccttggactcggctatacccttggcgtgacggcgcgcgataactgggactacatccccattccggtgatcttaccattggcgtcaataggttacggtccggcgactttccagatgacctatattcccggcacctacaataacggtaacgtttacttcgcctgggctcgtatacagttttaattcgctaagtcttagcaataaatgagataagcggtgtgtcttgtggaaaaacaaggactaaagcgttacccactaaaaaagatagcgacttttatcactttttagcaaagttgcactggacaaaaggtaccacaattggtgtactgatactcgacacagcattagtgtcgatttttcatataaaggtaattttgatggcggcggtgatcaataacgcaatgctggaagccattctggcagaaatcaggccgctgattggccgcggtaaagtggcggattacattccggcgctggccagcgtcagcggcgataagcttggcattgcgatcagtacggtagacgggcagcacttcgccgccggcgatgcgcatgaacgtttttccatccagtctatctccaaggtattgagcctggtggtggccatgaaccactatcaggaagaggagatctggcagcgggtgggcaaagatccctccggccaaccctttaactcccttttgcagctggagatcgagcagggcaaaccgcgaaacccgtttatcaacgccggggcgctggtggtctgcgacatgctgcagagccggctcagcgccccgcgtcagcggatgctggagattgtccgccgcctgagcggcgtggccgatatcgcctacgatccggtggtggcccgctctgagttcgagcattcggcgcgcaacgccgccatcgcctggctgatgaaatccttcggtaacttccataacgacgtcgccaccgtgctgcagaactatttccactactgttcgctggagatgagctgcgttgagctggcgcgaaccttcctgttcctcgccgatcgcggtatcgccccgcacctggaggcaccggttatcgcgcccattcagtcccgtcaggtgaatgccctgatgatgaccagcggcatgtaccagaacgccggcgaattcgcctggcgcgttggcctgccggcgaaatcgggcgtcggcggcggaattgtggcgattgtgccgcaggagatggcgatcgccgtgtggagcccggagcttgatgacgccgggaactcgctggccggcgtggcgctgctggaaaaactgactcagcggatggggaggtcggtgttctga

SEQ ID NO: 433 - DNA, 2327 bp, Artificial Sequence
  glsA2::Prm1.2 ATG-start with 500bp flank
tgggcgacccgcgcgatgagcaaaactacgtcgggccgatggcgcgtttcgacctgcgcgatgaactgcaccagcaggtaacggcgacccttgatgaaggggcaactctgctgctgggcgcagaaaaaatcgaaggagcgggcaactactatgcgccaacggtgctgggcaatgtcaccgccgggatgaccggttttcgtcaggagctgtttggtccggtagcaaccctgaccaccgctcgcgacgctgaccatgcgctggccctcgccaacgacagcgagtttggtttgtctgcaacggtctataccaccgacgaggcgcaggcccagcgcttcgcccgcgagctggagtgcggcggcgtgttcctcaacggctactgcgccagcgacgcccgcgtggccttcggcggcgtgaagaagagtggttttggtcgcgagctgtcacattttggtctgcacgagttctgtaatgcgcagaccgtctggaaagaccgtcgctaagcccgctgaccgaccagaacttccaccttggactcggctatacccttggcgtgacggcgcgcgataactgggactacatccccattccggtgatcttaccattggcgtcaataggttacggtccggcgactttccagatgacctatattcccggcacctacaataacggtaacgtttacttcgcctgggctcgtatacagttttaattcgctaagtcttagcaataaatgagataagcggtgtgtcttgtggaaaaacaaggactaaagcgttacccactaaaaaagatagcgacttttatcactttttagcaaagttgcactggacaaaaggtaccacaattggtgtactgatactcgacacagcattagtgtcgatttttcatataaaggtaattttgatggcggcggtgatcaataacgcaatgctggaagccattctggcagaaatcaggccgctgattggccgcggtaaagtggcggattacattccggcgctggccagcgtcagcggcgataagcttggcattgcgatcagtacggtagacgggcagcacttcgccgccggcgatgcgcatgaacgtttttccatccagtctatctccaaggtattgagcctggtggtggccatgaaccactatcaggaagaggagatctggcagcgggtgggcaaagatccctccggccaaccctttaactcccttttgcagctggagatcgagcagggcaaaccgcgaaacccgtttatcaacgccggggcgctggtggtctgcgacatgctgcagagccggctcagcgccccgcgtcagcggatgctggagattgtccgccgcctgagcggcgtggccgatatcgcctacgatccggtggtggcccgctctgagttcgagcattcggcgcgcaacgccgccatcgcctggctgatgaaatccttcggtaacttccataacgacgtcgccaccgtgctgcagaactatttccactactgttcgctggagatgagctgcgttgagctggcgcgaaccttcctgttcctcgccgatcgcggtatcgccccgcacctggaggcaccggttatcgcgcccattcagtcccgtcaggtgaatgccctgatgatgaccagcggcatgtaccagaacgccggcgaattcgcctggcgcgttggcctgccggcgaaatcgggcgtcggcggcggaattgtggcgattgtgccgcaggagatggcgatcgccgtgtggagcccggagcttgatgacgccgggaactcgctggccggcgtggcgctgctggaaaaactgactcagcggatggggaggtcggtgttctgatggttgagcaggatcggttgtttgcccgtctggcgcgctcgacgtttcgttcacgctttcgactcggggtcaaagagaggcaatactgtctagataaggggccggagatcatcgaccagcacgctgcggattttatccgccagcggctggcgcccgccgaaccgatgaacgacggtaagcagacgccgatgcgcggccatccggtatttatcgcccagcatgcgaccgccacctgctgccgcggctgtctggaaaaatggcacgccattccccacggccgcgcgctgagcgagcaggagcagcgctatgtggtgcaggtgatccatcactggctggtgctgcagatgaacggcccgtctgtgcggtaatctgcatttgatcggcgccggagtatgcctgataaatattctcatgttatgataatccgctaactaattattaacataataattgcctgaaacaattagacggataattactgaatgtcttcactgtcgatt

1. A guided microbial remodeling method for the rational improvement of plant-associated microbes to perform plant-beneficial functions, comprising:
a. providing a plurality of microbial species that are associated with a target plant of interest;
b. assaying the plurality of microbial species for: colonization metrics, and ability to perform a plant-beneficial function of interest;
c. selecting a candidate microbial species from the plurality of assayed microbial species;
d. introducing one or more targeted non-intergeneric genetic variations into the candidate microbial species;
e. confirming integration of the non-intergeneric genetic variation at the target genomic locus and absence of any transgenetic sequence; and
f. repeating steps d) and e) one or more times, until the candidate microbial species has acquired an improved ability to perform the plant-beneficial function of interest.

2. The guided microbial remodeling method according to claim 1, wherein the step b) comprises assaying the plurality of microbial species for transcriptionally active genes under metabolically relevant environmental conditions.

3. The guided microbial remodeling method according to claim 1, comprising a step of sequencing the genomes of the plurality of microbial species obtained in step a) and characterizing one or more genomic pathways, or sets of genes, that are associated with a plant-beneficial function of interest.

4. The guided microbial remodeling method according to claim 1, wherein the step d) of introducing one or more targeted non-intergeneric genetic variations into the candidate microbial species comprises:
a. transforming the candidate microbial species with a transformation plasmid comprising (i) a selection marker, (ii) a counterselection marker, (iii) a DNA fragment comprising: a non-intergeneric genetic variation to be introduced into the candidate microbial species at a target genomic locus in one or more genomic pathways, or sets of genes, that are associated with a plant-beneficial function of interest, and homology arms to the target genomic locus flanking the non-intergeneric genetic variation, and (iv) plasmid backbone;
b. selecting for a candidate microbial species that has undergone an initial homologous recombination and has the non-intergeneric genetic variation integrated into the target genomic locus based on the presence of the selection marker in the genome; and
c. selecting for a candidate microbial species that has the non-intergeneric genetic variation integrated into the target genomic locus, but has undergone an additional homologous recombination that loops-out the plasmid backbone, based on the absence of the counterselection marker.

5. The guided microbial remodeling method according to claim 1, wherein the step e) of confirming integration of the non-intergeneric genetic variation at the target genomic locus and absence of any transgenetic sequence comprises sequencing the genome of the transformed candidate microbial species.

6. (canceled)

7. The guided microbial remodeling method according to claim 1, wherein the plant-beneficial function of interest is nitrogen fixation, phosphate solubilizatoin, or microbial colonization.

8. (canceled)

9. (canceled)

10. The guided microbial remodeling method according to claim 3, wherein the step of sequencing comprises whole genome sequencing.

11. The guided microbial remodeling method according to claim 3, comprising characterizing the nitrogen fixation pathway.

12. (canceled)

13. The guided microbial remodeling method according to claim 3, comprising characterizing one or more genes involved in a pathway selected from the group consisting of: exopolysaccharide production, endo-polygalaturonase production, trehalose production, and glutamine conversion.

14. (canceled)

15. The guided microbial remodeling method according to claim 3, comprising characterizing one or more genes selected from the group consisting of: nifA, nifL, ntrB, ntrC, polynucleotide encoding glutamine synthetase, glnA, glnB, glnK, drat, amtB, polynucleotide encoding glutaminase, glnD, glnE, nifJ, nifH, nifD, nifK, nifY, nifE, nifN, nifU, nifS, nifV, nifW, nifZ, nifM, nifF, nifB, nifQ, a gene associated with biosynthesis of a nitrogenase enzyme, bcsii, bcsiii, yjbE, fhaB, pehA, otsB, treZ, glsA2, and combinations thereof.

16. (canceled)

17. (canceled)

18. The guided microbial remodeling method according to claim 1, wherein step b) comprises assaying the plurality of microbial species for colonization metrics under greenhouse conditions, lab based conditions, and/or under field conditions.

19. The guided microbial remodeling method according to claim 1, wherein a colonization metric assayed in step b) comprises at least one of the following: spatial colonization patterns, temporal colonization dynamics, density of colonization, or combinations thereof.

20. (canceled)

21. The guided microbial remodeling method according to claim 2, wherein assaying the plurality of microbial species for transcriptionally active genes under metabolically relevant environmental conditions occurs in vitro, under greenhouse, or lab based, or field conditions and comprises measuring the transcriptomic profile of the microbial species.

22. The guided microbial remodeling method according to claim 2, wherein assaying the plurality of microbial species for transcriptionally active genes under metabolically relevant environmental conditions occurs in vitro, under greenhouse, or lab based, or field conditions and comprises measuring the transcriptomic activity of genes associated with the microbial species ability to perform a plant-beneficial function of interest.

23. The guided microbial remodeling method according to claim 2, wherein assaying the plurality of microbial species for transcriptionally active genes under metabolically relevant environmental conditions occurs under greenhouse or lab based, or field conditions and comprises at least one of:
measuring the transcriptomic activity of regulatory gene sequences,
measuring the transcriptomic activity of promotor sequences;
measuring the transcriptomic activity of promotor sequences in the presence of exogenous nitrogen, and
measuring the transcriptomic activity of promoter sequences in the presence of exogenous nitrogen, wherein said transcriptomic activity of the promoter sequences is measured by quantifying the expression of a regulated gene.

24.-36. (canceled)

37. The guided microbial remodeling method according to claim 2, wherein assaying the plurality of microbial species for transcriptionally active genes under metabolically relevant environmental conditions occurs in vitro and comprises at least one of:
measuring the transcriptomic activity of regulatory gene sequences,
measuring the transcriptomic activity of promotor sequences;
measuring the transcriptomic activity of promotor sequences in N-depleted and N-replete conditions, and
measuring the transcriptomic activity of promoter sequences in N-depleted and N-replete conditions, wherein said transcriptomic activity of the promoter sequences is measured by quantifying the expression of a regulated gene.

38.-41. (canceled)

42. The guided microbial remodeling method according to claim 1, wherein assaying the plurality of microbial species for colonization metrics, comprises: growing said plurality of microbial species in intimate association with a target plant under greenhouse conditions, or lab based conditions, and/or field conditions.

43. (canceled)

44. (canceled)

45. The guided microbial remodeling method according to claim 2, wherein assaying the plurality of microbial species for transcriptionally active genes under metabolically relevant environmental conditions, comprises: growing said plurality of microbial species in intimate association with a target plant under greenhouse conditions, lab based conditions, or field conditions.

46. (canceled)

47. (canceled)

48. The guided microbial remodeling method according to claim 1, wherein step b) comprises assaying the plurality of microbial species for ability to perform a plant-beneficial function of interest under greenhouse or lab based conditions.

49. The guided microbial remodeling method according to claim 1, wherein step b) comprises assaying the plurality of microbial species for nitrogen fixation activity.

50. The guided microbial remodeling method according to claim 1, wherein step b) comprises assaying the plurality of microbial species for nitrogen fixation activity in an acetylene reduction assay or ammonium excretion assay.

51. (canceled)

52. The guided microbial remodeling method according to claim 5, wherein the sequencing comprises whole genome sequencing.

53. (canceled)

54. (canceled)

55. The guided microbial remodeling method according to claim 1, wherein in step d), said non-intergeneric genetic variations are selected from the group consisting of: full gene deletions, partial gene deletions, promoter insertions, single base pair changes, and combinations thereof.

56. (canceled)

57. (canceled)

58. (canceled)

59. (canceled)

60. (canceled)

61. A computationally guided microbial remodeling method for the rational improvement of plant-associated microbes to perform plant-beneficial functions, comprising:
a. accessing a plurality of microbial whole genome sequences;
b. identifying a plurality of regulatory gene sequences that actively regulate the transcription of a gene under a metabolically relevant environmental condition;
c. identifying a plurality of genes associated with a plant-beneficial function;
d. selecting a regulatory gene sequence and a gene associated with a plant-beneficial function from said pluralities; wherein steps a)-d) occur in silico; and
e. manufacturing, in vivo, a remodeled microbial cell that has the selected regulatory gene sequence operably linked to the selected gene associated with a plant-beneficial function, thereby improving the expression of the gene associated with a plant-beneficial function.

62. A computationally guided microbial remodeling system for the rational improvement of plant-associated microbes to perform plant-beneficial functions, comprising:
a. one or more processors; and
b. one or more memories operatively coupled to the one or more processors and having instructions stored thereon, that when executed by the one or more processors, cause the system to:
i. access a plurality of microbial whole genome sequences;
ii. identify a plurality of regulatory gene sequences that actively regulate the transcription of a gene under a metabolically relevant environmental condition;
iii. identify a plurality of genes associated with a plant-beneficial function; and
iv. select a regulatory gene sequence and a gene associated with a plant-beneficial function from said pluralities.

63. A computationally guided microbial remodeling method for the rational improvement of plant-associated microbes to perform plant-beneficial functions, comprising:
a. activating a computer system having: one or more processors and one or more memories operatively coupled to the one or more processors and having instructions stored thereon, thereby causing the one or more processors to execute the instructions, and cause the system to:
i. access a plurality of microbial whole genome sequences;
ii. identify a plurality of regulatory gene sequences that actively regulate the transcription of a gene under a metabolically relevant environmental condition;
iii. identify a plurality of genes associated with a plant-beneficial function;
iv. select a regulatory gene sequence and a gene associated with a plant-beneficial function from said pluralities; and
b. manufacturing, in vivo, a remodeled microbial cell that has the selected regulatory gene sequence operably linked to the selected gene associated with a plant-beneficial function, thereby improving the expression of the gene associated with a plant-beneficial function.
